(19) United States
(12) Patent Application Publication
(10) Pub. No.: US 2026/0209374 A1
(43) Pub. Date: Jul. 23, 2026

(54) TNFR1 ANTAGONISTS LACKING AGONIST ACTIVITY AND USES THEREOF

(71) Applicant: ENOSI THERAPEUTICS CORPORATION, Eugene, OR (US)

(72) Inventors: H. Michael SHEPARD, Eugene, OR (US); Pei JIN, Palo Alto, CA (US)

(21) Appl. No.: 19/554,453

(22) Filed: Mar. 2, 2026

Related U.S. Application Data
(63) Continuation of application No. PCT/US24/44540, filed on Aug. 29, 2024.
(60) Provisional application No. 63/579,491, filed on Aug. 29, 2023.

(51) Int. Cl. C07K 16/28; A61P 11/00; A61P 19/02; A61P 37/06; C07K 14/765

(52) U.S. Cl. CPC C07K 16/2878; A61P 11/00; A61P 19/02; A61P 37/06; C07K 14/765; C07K 2317/569; C07K 2319/30

(57) ABSTRACT

Provided are molecular constructs that target tumor necrosis factor receptor 1 (TNFR1). The constructs are for treating diseases, disorders, and conditions in which TNFR1 and/or TNF is/are involved in the etiology or in which their inhibition or activation thereof can ameliorate the disease, disorder, and condition or a symptom thereof. Among the constructs provided herein, are TNFR1 antagonist constructs that are engineered to inhibit TNFR1 function; the constructs do not exhibit TNFR1 agonist activity. Methods of treatment of the various diseases in which TNF and its receptors play a role also are provided.

### RELATED APPLICATIONS

[0001] This application is a continuation of International PCT application No. PCT/US2024/044540, filed, Aug. 29, 2024, entitled “TNFR1 ANTAGONISTS LACKING AGONIST ACTIVITY AND USES THEREOF,” to inventors H. Michael Shepard and Pei Jin, and to Applicant Enosi Therapeutics Corporation, which claims benefit of priority to U.S. provisional application Ser. No. 63/579,491, filed Aug. 29, 2023, entitled “TNFR1 ANTAGONISTS LACKING AGONIST ACTIVITY AND USES THEREOF,” to inventors H. Michael Shepard and Pei Jin, and to Applicant Enosi Therapeutics Corporation.

[0002] Benefit of priority also is claimed to U.S. provisional application Ser. No. 63/579,491, filed Aug. 29, 2023, entitled “TNFR1 ANTAGONISTS LACKING AGONIST ACTIVITY AND USES THEREOF,” to inventors H. Michael Shepard and Pei Jin, and to Applicant Enosi Therapeutics Corporation.

[0003] This application is related to International PCT application No. PCT/US2021/048074, filed Aug. 27, 2021, published as International PCT application No WO 2022/047243 on Mar. 3, 2022, and U.S. application Ser. No. 17/731,595, filed on Apr. 28, 2022, and published as US Publication No.: 2022/0288226 on Sep. 15, 2022, each to inventor H. Michael Shepard, and Applicant Enosi Therapeutics Corporation, and each entitled “METHODS AND COMPOSITIONS TO TREAT AUTOIMMUNE DISEASES AND CANCER,” which claims the benefit of priority to U.S. Provisional Application Ser. No. 63/071,313, filed Aug. 27, 2020, entitled “METHODS AND COMPOSITIONS TO TREAT AUTOIMMUNE DISEASES AND CANCER” to inventor H. Michael Shepard, and Applicant Enosi Life Sciences Corp., and now assigned to Enosi Therapeutics Corporation.

[0004] This application also is related to International PCT application No. PCT/US2020/018739, filed Feb. 19, 2020, entitled “ANTIBODIES AND ENONOMERS,” published on Aug. 27, 2020, as International PCT Publication No. WO 2020/172218, to inventor H. Michael Shepard, and Applicant Enosi Life Sciences Corp., and now assigned to Enosi Therapeutics Corporation. This application also is related to the U.S. application Ser. No. 17/432,720, filed Aug. 20, 2021, which is the U.S. National Stage Application of PCT/US2020/018739, filed Feb. 19, 2020, which claims the benefit of priority to U.S. Provisional Application Ser. No. 62/808,635, filed Feb. 21, 2019.

[0005] The subject matter of each of these applications is incorporated by reference in its entirety.

### INCORPORATION BY REFERENCE OF SEQUENCE LISTING PROVIDED ELECTRONICALLY

[0006] An electronic version of the Sequence Listing is filed herewith, the contents of which are incorporated by reference in their entirety. The electronic file was created on Mar. 2, 2026, is 2,609,388 bytes in size, and is titled 5306SEQ001.xml.

### FIELD

[0007] This application is directed to nucleic acid constructs and encoded products for use as anti-TNF therapies. The treated diseases are those in which TNF receptors and/or TNF or the TNF/TNF receptor(s) pathways is involved or plays a role in the etiology thereof.

### BACKGROUND

[0008] Anti-TNF therapies/TNF-blockers (a type of biological Disease Modifying Anti-Rheumatic Drugs; DMARDs) typically are prescribed after the failure of conventional DMARDs. These therapies include monoclonal antibodies (mAbs), such as the chimeric mAb infliximab (Remicade®); containing a murine variable region and a human IgG1 constant region, and the fully humanized mAbs (IgG1s) adalimumab (sold, for example under the trademark Humira®), and golimumab (Simponi® antibody); the PEGylated humanized Fab′ fragment of a mAb targeting TNF, certolizumab pegol (Cimzia® antibody); and TNFR2 fusion proteins, such as the TNFR2-Fc fusion protein etanercept (sold under the trademark Enbrel®), which contains the extracellular receptor region that contains the binding site of human TNFR2 fused to the Fc of human IgG1. The drugs sold under the trademarks Remsima® and Inflectra® are biosimilars of infliximab that are approved for use in the European Union for the treatment of various autoimmune and chronic inflammatory diseases and disorders. These TNF inhibitors, which sequester TNF, are used for the treatment of various diseases and conditions, including, for example, RA, psoriasis, psoriatic arthritis, ankylosing spondylitis, juvenile idiopathic arthritis (JIA), and/or inflammatory bowel disease (IBD; such as, Crohn's disease and ulcerative colitis).

[0009] Such therapies, however, are associated with severe side effects, including, for example, an increased risk of sepsis and serious infections, such as listeriosis, reactivation of tuberculosis, reactivation of hepatitis B/C, reactivation of herpes zoster, and invasive fungal and other opportunistic infections, including reactivation of M. tuberculosis infection. These therapies have been shown to induce macrophage apoptosis in the rheumatoid synovium. Infliximab is associated with increased apoptosis in the inflammatory cell infiltrate in the guts of patients with Crohn's disease. Other anti-rheumatic drugs, such as methotrexate and glucocorticoids, also can induce apoptosis in immune cells (see, e.g., Vigna-Perez et al. (2005) Clin. Exp. Immunol. 141(2):372-380). These therapeutic agents also can cause worsening of severe congestive heart failure, drug-induced lupus, and demyelinating central nervous system (CNS) diseases, as well as lymphomas and non-melanoma skin cancers (see, e.g., Benjamin et al. Disease Modifying Anti-Rheumatic Drugs (DMARDs) [Updated 2020 Feb. 27]. In: StatPearls [Internet]. Treasure Island (FL): StatPearls Publishing; 2020 January Available from: (ncbi.nlm.nih.gov/books/NBK507863/)). Other adverse side effects include liver injury, demyelinating disease/CNS disorders, lupus, psoriasis, sarcoidosis, and an increased susceptibility to the development of additional autoimmune diseases, as well as cancers, including lymphomas and solid malignancies (see, e.g., Dong et al. (2016) Proc. Natl. Acad. Sci. U.S.A. 113(43):12304-12309; Zalevsky et al. (2007) J. Immunol. 179:1872-1883; Zoran et al. (2019) Sci. Rep. 9:17231).

[0010] Thus, the uses of these therapeutic agents, particularly for chronic diseases/conditions that require long-term administration, such as arthritis and inflammatory bowel disease (IBD, are limited. Approximately 30% of RA patients are non-responsive, or therapeutic benefits are not sustained, with the use of anti-TNF therapies (see, e.g., McCann et al. (2014) Arthritis & Rheumatology 66(10):2728-2738). Non-responsiveness also occurs in non-RA patients receiving anti-TNF therapeutics. Depending on the anti-TNF agent, 13-33% of treated patients do not respond to treatment, and up to 46% stop responding, resulting in discontinuation or dose increase (see, e.g., Richter et al. (2019) MABS 11(4):653-665). Thus, there is a need for therapies with improved therapeutic efficacy and safety.

### SUMMARY

[0011] Provided are molecular constructs, and nucleic acids encoding them, that antagonize tumor necrosis factor receptor 1 (TNFR1). Constructs provided herein include those that do not have or have reduced TNFR1 agonist activity, or they do not have or have reduced TNFR2 antagonist activity compared to available TNFR1 antagonists. The constructs are for treating diseases, disorders, and conditions in which these receptors and/or TNF are involved in the etiology or in which their inhibition or activation can ameliorate the disease, disorder, and/or condition or a symptom thereof.

[0012] As discussed herein, bivalent antibodies that target TNFR1 reportedly are partially agonistic or fully agonistic by virtue of receptor clustering by the antibody (see, e.g., Richter et al., PMID 23977237, Richter et al., PMID 30252601, Belka et al., PMID 7720706, Mandik-Nayak et al., doi.org/10.4049/jimmunol.167.4.1920, Yu et al., doi.org/10.1038/s42003-021-02309-5). Prior art that describes TNFR1 antagonist antibody constructs showed that bivalency in anti-TNFR1 antibodies results in TNFR1 activation due to receptor clustering by the construct antibody. For example, US Patent Publication 2014/0112929 describes the agonistic activity of bivalent TNFR1 binding antibodies and states that such antibodies are not useful as inhibitors of TNFR1 because of the concomitant agonist activity. In contrast, it is shown herein, that among anti-TNFR1 bivalent constructs, such as constructs that contain dAbs or VhH domains, are those that, when provided as a bivalent construct that includes modified Fc's as described herein, do not have TNFR1 agonist activity. For example, the constructs designated herein as EN-1206 bivalent and monovalent that contain the dAb from SEQ ID NO:59, do not have agonist activity. In contrast, constructs that include the designation EN208 or EN1208, containing the dAb of SEQ ID NO:54 (DOM1 h-574-208) bivalent does have agonist activity. The dAbs in each of these constructs, 1206 vs 1208, bind different epitopes.

[0013] Constructs provided herein are those that bind to the same epitope as the dAb (SEQ ID NO:59) in the EN-1206 constructs and have no agonist activity in bivalent form or reduced agonist activity compared to the EN1208 bivalent construct. These include constructs that comprise one of the dAbs set forth in any of SEQ ID NOs: 55-84, 86-88, 450, 495-498, which bind to the same epitope as the EN1206 constructs, which constructs contain the dAb (SEQ ID NO:59) and variants thereof that have at least 95% sequence identity to one or more of the dAbs set forth in any of SEQ ID NOs: 55-84, 86-88, 450, 495-498 and retain binding to the same epitope as the EN1206 constructs.

[0014] Identification of dAbs with such properties are detailed herein; see FIG. 19 and accompanying text. dAbs that bind to the same epitope as EN1206 include those that comprises CDRS that have at least 95% sequence identity to HCDR1, HCDR2, and HCDR3 of DOM1 h-131-511 (SEQ ID NO: 60), which binds to domain 3 of TNFR1 extracellular domain. FIG. 18 shows the CDRs for DOM1 h-131-511 and DOM1 h-131-206 derived therefrom (SEQ ID NO:59). EN1206 constructs contain the dAb DOM1 h-131-206.

[0015] The constructs contained herein are monovalent or divalent constructs that contain one or two, respectively, dAbs linked directly or via a polypeptide linker to an Fc, generally a modified Fc. Modified Fc's are detailed below. Among the dAbs are those of SEQ ID NOs: 54-672 that when in the bivalent construct have antagonist activity and do not have agonist activity. In particular, the dAb comprise one of the dAbs set forth in any of SEQ ID NOs: 55-84, 86-88, 450, 495-498 and variants there that have at least 95% sequence identity thereto and bind to the same epitope as EN 1206. EN1206 (DOM1 h-131-206; SEQ ID NO: 59) binds to the domain 3 of TNFR1 ECD with an affinity of 407 pM measured by SPR. The DOM1 h-131-206 was optimized for affinity and stability based on DOM1 h-131-511. As detailed herein, EN-1000-206 (‘206’) is a VhH single domain polypeptide, EN-1206-Fc-MV is a knobs in hole construct pairing an IgG1 Fc-only domain to a fusion of 206-IgG1-Fc).EN-1206-Fc-BV is a homodimeric/bivalent 206-IgG1-Fc; and EN-1208-Fc-BV is Same as EN-1206-Fc-BV except the VhH domain was EN-1000-208 (containing the dAb of SEQ ID NO:54), a different VhH domain fused with IgG1-Fc to form a bivalent antibody-like protein. 1208 is binds to a different epitope on TNFR1 from the dAb in the 1206s (see, FIGS. 8A and 8B, which depict the structures).

[0016] The constructs also can include all or a portion of nanobodies (SEQ ID NOs: 480-487) that bind to TNFR1, and that, when in the constructs, result in constructs that are TNFR1 antagonists that do not antagonize TNFR2 and that are not TNFR1agonists. Linkers and modified Fc's for including in the constructs are described throughout the disclosure. The constructs can be monovalent, but in general are bivalent. When monovalent, the Fc's can include holes and knobs.

[0017] Suitable dAbs can be identified by the methods exemplified in the Examples. Selection constructs that do not have agonist activity can be effected by screening, such as identifying those with high affinity binding specific for TNFR1, such as in the nM range of affinity; followed by screening using the THP1 assay (see the Examples) for inhibition of TNF-stimulated expression of nuclear factor kappa-light-chain-enhancer of activated B cells (NF-κB) and or expression of inflammatory cytokines, and selecting the constructs that lack agonistic activity in the THP1 assay. Alternatively, the constructs contain dAbs that bind to the same epitope as the dAb of SEQ ID NO:59 (Dom-131-206). Hence also provided are methods for identifying TNFR1 antagonists that do not have agonist activity. For discussions regarding the role of cytokines and the NF-κB signaling in immunity see, e.g., Yoshimura et al., PMID 28716890; Front Immunol. 2021; 12: 705485, Published online 2021 Jul. 7. doi: 10.3389/fimmu.2021.705485; see, also doi: 10.1080/19420862.2019.1596512; ncbi.nlm.nih.gov>articles>PMC3011218 by K A Zettlitz (2010), which describes In vitro, ATROSAB inhibited TNF-mediated responses, such as apoptosis induction and activation of NFκB-dependent gene expression, such as IL-6 and IL-8; ncbi.nlm.nih.gov>articles>PMC8294390 by F Richter.

[0018] As shown in the application the 1206 and 1208 constructs (detailed in the Examples) meet the criteria of specific binding to TNFR1, and of blocking TNF binding to TNFR1, but they differ in activity as demonstrated in assays that show showing agonism. These assays can be used and were used to identify constructs that are TNFR1 antagonists and that do not have TNFR1 agonist activity. Such constructs are provided herein.

[0019] Cells have two TNF receptors: TNFR1 and TNFR2. These pathways balance one another in normal physiology. TNF/TNFR1 drives inflammation, while TNF/TNFR2 is anti-inflammatory. TNFR2 generally is activated later than TNFR1, and so does not immediately impact useful TNF-induced inflammation but activates later to suppress over activation of inflammatory pathways. Simultaneous inhibition of both pathways removes the inflammation-dampening effect of TNFR2. Existing TNF blockers limit their own efficacy because the Treg generator (TNFR2), which is anti-inflammatory, is turned down/off.

[0020] The constructs provided herein, among other properties that differ from prior therapeutics that target TNF/TNFRs, inhibit TNFR1 signaling or activity without compromising the ability of a treated subject to fight opportunistic infections. Among the constructs provided herein is one type that is a modified single chain antibody or other configuration as detailed herein that specifically targets and inhibits TNFR1, but does not antagonize TNFR2, and does not exhibit transient activation of TNFR1 via receptor clustering. Constructs provided herein silence the TNF inflammatory pathway mediated by TNFR1, but retain, and in some embodiments enhance, the healing pathway of TNFR2. These constructs can be administered to treat indications where TNF blockers have failed.

[0021] Among the constructs provided herein are constructs that specifically inhibit tumor necrosis factor receptor type 1; provided are methods and uses of the constructs for treating diseases, disorders, and conditions in which TNF or receptors therefor play a role in the etiology or in the symptoms.

[0022] Existing anti-TNF drugs block overzealous inflammation, which occurs in autoimmune diseases, including rheumatoid arthritis, polyarticular juvenile idiopathic arthritis, axial spondylarthritis, ankylosing spondylitis, psoriatic arthritis, psoriasis, Crohn's disease, pediatric Crohn's disease, and ulcerative colitis. The constructs herein can be used to treat the same diseases, but avoid the deleterious or adverse side effects. Constructs provided herein are more effective at suppressing inflammatory cytokines in vivo than prior therapeutics, such as the TNFR2-Fc fusion protein etanercept (sold under the trademark Enbrel®), and preserve regulatory T-cell function. The constructs can include activity modifiers or property modifiers to increase serum half-life, and have demonstrated activity in blocking TNFR1 signaling, such as in TNF assays that compare activity with adalimumab (brand name, e.g., Humira®) and/or etanercept (sold as Enbrel®).

[0023] The constructs preserve macrophage function better than adalimumab, showing they do not lead to opportunistic infections; they also preserve Treg function substantially better than adalimumab (e.g., sold as Humira®) or etanercept (sold under the trademark Enbrel®), and are as therapeutically effective in treating diseases, disorders, and conditions, such as rheumatoid arthritis. In some embodiments, the Kd is <1 nM, and the t_{1/2} in vivo is about 10-12 days. The constructs can be administered by any suitable route for the particular indication. Routes include, but are not limited to, subcutaneously, intravenously, intratumorally, intra-hepatically, topically, mucosally, intradermally, and any other suitable route.

[0024] Specific constructs provided herein are the monovalent and bivalent constructs that comprise the dAb of SEQ ID NO:59 linked to an Fc that is modified for increased half-life with the mutations YTE as detailed below. The monovalent construct (EN1206-MV; see FIG. 8A) comprises a first chain that is the modified Fc that also is modified to include a “knob,” a second chain with the dAb linked to the modified Fc that also is modified to include a “hole,”, to form the two chain structure. The Fc portions also include mutations to mutations to minimize its in vivo Fe effector functions. The sequences are as follows:

Chain 1 of EN1206 monovalent - SEQ ID NO:1505 containing modified Fc hole:
Fc only (hole: T366S, L368A, Y407V); half- life increase - YTE
(M252Y, S254T, T256E), and minimized its in vivo Fc effector function - LALAPG
(L234A, L235A, P329G)
DKTHTCPPCPAPEAAGGPSVFLFPPKPKDTLYITREPEVTCVVVDVSHEDPEVKFNWY
VDGVEVHNAKTKPREEQYNSTYRVVSVLTVLHQDWLNGKEYKCKVSNKALGAPIE
KTISKAKGQPREPQVYTLPPSRDELTKNQVSLSCAVKGFYPSDIAVEWESNGQPENN
YKTTPPVLDSDGSFFLVSKLTVDKSRWQQGNVFSCSVMHEALHNHYTQKSLSLSPGK
Chain 2 of EN1206 monovalent dAB with Fc knob modified for increased half-life
and minimized Fc effector function - One-armed VHH-Fc (knob: T366W) including YTE
(M252Y, S254T, T256E) LALAPG (L234A, L235A, P329G))(SEQ ID NO: 1506)
EVQLLESGGGLVQPGGSLRLSCAASGFTFAHETMVWVRQAPGKGLEWVSHIPPDGQ
DPFYADSVKGRFTISRDNSKNTLYLQMNSLRAEDTAVYHCALLPKRGPWFDYWGQG
TLVTVSSDKTHTCPPCPAPEAAGGPSVFLFPPKPKDTLYITREPEVTCVVVDVSHEDPE
VKFNWYVDGVEVHNAKTKPREEQYNSTYRVVSVLTVLHQDWLNGKEYKCKVSNK
ALGAPIEKTISKAKGQPREPQVYTLPPSRDELTKNQVSLWCLVKGFYPSDIAVEWESN
GQPENNYKTTPPVLDSDGSFFLYSKLTVDKSRWQQGNVFSCSVMHEALHNHYTQKS
LSLSPGK
The bivalent construct, designated EN1206-BV, includes two identical chains.
Both chains of EN1206 bivalent include the dAb and Fc with modifications - YTE
(M252Y, S254T, T256E)LALAPG(L234A, L235A, P329G)(see, (SEQ ID NO: 1507):
EVQLLESGGGLVQPGGSLRLSCAASGFTFAHETMVWVRQAPGKGLEWVSHIPPDGQ
DPFYADSVKGRFTISRDNSKNTLYLQMNSLRAEDTAVYHCALLPKRGPWFDYWGQG
TLVTVSSDKTHTCPPCPAPEAAGGPSVFLFPPKPKDTLYITREPEVTCVVVDVSHEDPE
VKFNWYVDGVEVHNAKTKPREEQYNSTYRVVSVLTVLHQDWLNGKEYKCKVSNK
ALGAPIEKTISKAKGQPREPQVYTLPPSRDELTKNQVSLTCLVKGFYPSDIAVEWESN
GQPENNYKTTPPVLDSDGSFFLYSKLTVDKSRWQQGNVFSCSVMHEALHNHYTQKS
LSLSPGK

[0025] In contrast, the construct designated EN1208-BV YTE-LALAPG includes two chains containing the dAb (SEQ ID NO:54) linked to the modified Fc; YTE (M252Y,S254T T256E) LALAPG (L234A,L235A,P329G):

EVQLLESGGGLVQPGGSLRLSCAASGFTFDKYSMGWVRQAPGKGLEWVSQ
ISDTADRTYYAHAVKGRFTISRDNSKNTLYLQMNSLRAEDTAVYYCAIYT
GRWVPFEYWGQGTLVTVSSDKTHTCPPCPAPEAAGGPSVFLFPPKPKDTL
YITREPEVTCVVVDVSHEDPEVKFNWYVDGVEVHNAKTKPREEQYNSTYR
VVSVLTVLHQDWLNGKEYKCKVSNKALGAPIEKTISKAKGQPREPQVYTL
PPSRDELTKNQVSLTCLVKGFYPSDIAVEWESNGQPENNYKTTPPVLDSD
GSFFLYSKLTVDKSRWQQGNVFSCSVMHEALHNHYTQKSLSLSPGK

[0026] As shown herein, each of EN1208-MV and BV has TNFR1 agonist activity: MGWSCIILFLVATATGVHS (SEQ ID NO:1509) is the leader sequence linked, upon expression, to the N-terminus of each chain, that is cleaved upon expression the cell. The Knob-into-hole mutations are engineered into the monovalent EN1206 for its heterodimer paring; the YTE mutations are engineered into the Fc to extend its in vivo half-life; the “LALAPG,” which refers to the replacements, by EU numbering: L234A/L235A/P329G, mutations are engineered into the Fc to minimize its in vivo Fc effector function; and numbering for the Fc modifications is EU numbering.

[0027] As demonstrated in the Examples, the EN1206 constructs do not exhibit TNRF1 agonist activity, and are TNRFR1 antagonists. As detailed herein, the EN1206 constructs comprise the dAb of SEQ ID NO:59, and the EN1208 constructs comprise the dAb of SEQ ID NO:54. The EN1206 constructs in all formats and forms do not have TNFR1 agonist activity; the EN1208 constructs do. Thus, constructs provided herein are EN1206 constructs or those that have TNFR1 inhibitor portions such that the resulting construct does not have TNFR1 agonist activity.

[0028] Other constructs that include a dAb or dAbs are those that bind to the same epitope as the dAb of SEQ ID NO:59 or SEQ ID NO: 60 also have antagonist activity, and not have agonist activity. In contrast, it is shown herein, that the EN1208 constructs have agonist activity. The dAb in the 1208 construct binds to a different epitope on TNFR1. Constructs that contain dAb's that bind to the same epitope as the dAb in the 1206 constructs. EN1206 (DOM1 h-131-206; SEQ ID NO: 59) binds to the domain 3 of TNFR1 ECD with an affinity of 407 pM measured by SPR. The dAb DOM1 h-131-206 (SEQ ID NO:59) was optimized for affinity and stability based on DOM1 h-131-511 (SEQ ID NO:60). The dAb are identified, and include the dAbs set forth in any of SEQ ID NOs: 55-84, 86-88, 450, 495-498 bind to the same epitope as EN 1206. Also included are dAbs and constructs containing the dAbs that comprise CDRs that have at least 95% sequence identity to HCDR1, HCDR2, and HCDR3 of DOM1 h-131-511 (SEQ ID NO: 60), which binds domain 3 of TNFR1 extracellular domain. FIG. 18 shows the CDRs for 511 and 206.

[0029] Constructs include those that comprise the dAb of SEQ ID NO:59 or a variant thereof having at least 95% sequence identity thereto and binding to the same epitope as SEQ ID NO:59 linked directly or indirectly via a linker to a modified Fc, wherein the Fc is modified to have increased half-life. These include the constructs designated EN1206-BV or EN1206-MV, wherein the EN1206-MV construct comprises Fc's with knobs into holes. Also provided are constructs that comprise the sequence of amino acids set forth in any or combinations of SEQ ID NOs: 1488-1490 and/or of SEQ ID NOs: 1505-1507 and variants thereof that bind TNRF1 and have anti-TNFR1 antagonist activity and retain the half-life of constructs that comprise SEQ ID NO:1488-1491.

[0030] Provided are monovalent constructs that comprise SEQ ID NO: 1489, the dAb-knob chain, linked to SEQ ID NO:1490, and the Fc hole chain, and variants thereof that bind TNRF1 and have anti-TNFR1 antagonist activity and retain the half-life of constructs, where the knob and hole Fc portions form an Fc multimer that displays the dAb portion.

[0031] Also provided are bivalent constructs that comprise the chain of SEQ ID NO: 1492 and variants thereof that bind TNRF1 and have anti-TNFR1 antagonist activity and retain the half-life of constructs.

[0032] Provided are constructs that are a tumor necrosis factor receptor 1 (TNFR1) antagonist construct of formula 1: (TNFR1 inhibitor)ₙ-linkerₚ-(activity modifier)_{q}, wherein: each of n and q is an integer, and each is independently 1, 2, or 3; p is 0, 1, 2 or 3; a TNFR1 inhibitor is a molecule that binds TNFR1 to inhibit (antagonize) activity of TNFR1; an activity modifier is a moiety that modulates or alters the activity or a pharmacological property of the construct compared to the construct in the absence of the activity modifier; and linkers increases flexibility of the construct, and/or moderates or reduces steric effects of the construct or its interaction with a receptor, and/or increases solubility in aqueous media of the construct. Linkers can contain a plurality of components. Linkers include chemical linkers, polypeptide linkers, and combinations thereof. The constructs can be linked via chemical and/or physical bonds. The constructs can be fusion proteins.

[0033] The TNFR1 inhibitor can comprise a domain antibody (dAb) or a single chain antibody. The construct includes those in which the TNFR1 inhibitor is a domain antibody (dAb), the activity modifier is not an unmodified single Fc region or a human serum albumin antibody. The constructs generally are bivalent and are those that are selected so that they do not have agonist activity. For example, the activity modifier (or property modifier) is a modified Fc region or is human serum albumin. In the constructs, the TNFR1 inhibitor can be one that inhibits TNFR1 signaling, and/or the activity modifier increases serum half-life of the construct. For example, the constructs include those in which the activity modifier is albumin or an Fc that is modified to have reduced or no ADCC (antibody dependent cellular cytotoxicity) activity and/or reduced or no CDC (complement-dependent cytotoxicity) activity. The TNFR1 inhibitor can be one that inhibits a TNFR1 activity, but does not antagonize tumor necrosis factor receptor 2 (TNFR2) activity. The TNFR1 inhibitor can be one that inhibits TNFR1 signaling.

[0034] Also provided are multi-specific constructs. For example, provided are multi-specific constructs, comprising a TNFR1 inhibitor and a Treg expander, wherein a bi-specific construct interacts with two different target receptors or antigens or epitopes on a receptor. Among the multi-specific constructs are those that are bi-specific for TNFR1 and a Treg expander. The Treg expander can be a TNFR2 agonist.

[0035] The constructs can comprise a linker to provide flexibility, increase solubility, and/or to relieve and/or reduce steric hindrance and/or Van der Waals interactions. The constructs, optionally, but generally comprise an activity modifier to alter or modulate the activity or a property of the construct. Provided are constructs that have Formula 2: (TNFR1 inhibitor)₁-(activity modifier)ᵣ₁ (Linker (L))ₚ-(activity modifier)ᵣ₂ (TNFR2 agonist)_{q}, or (TNFR1 inhibitor)₁-(activity modifier)ᵣ₁-(Linker (L))ₚ-(activity modifier)ᵣ₂ (Treg expander)_{q}, where: n=1, 2, or 3, p=1, 2, or 3, q=0, 1 or 2, and each of r1 and r2 is independently 0, 1, or 2; and the components can be in the order specified or any other order as long as the construct interacts with TNFR1 and TNFR2 to antagonize TNFR1 and agonize TNFR2, or has Treg expander activity. For example, included are constructs, among any of those provided herein, where the TNFR1 inhibitor moiety inhibits binding of TNF-α binding to TNFR1 and/or inhibits signaling.

[0036] Also provided are constructs of formula 3a or 3b: (TNFR2 agonist or Treg expander)₁-linkerₚ-(activity modifier)_{q}, formula 3a, or (activity modifier)_{q}-linkerₚ-(TNFR2 agonist or Treg expander)ₙ, formula 3b, where: each of n and q is an integer, and each is independently 1, 2, or 3; p is 0, 1, 2 or 3; an activity modifier is a moiety that alters a pharmacological property or an activity of the construct; a TNFR2 agonist interacts with TNFR2 resulting in TNFR2 activity; a Treg expander, includes TNFR2 agonists, and is a molecule that results in increased Treg cells; and a linker increases flexibility and/or moderates or reduces steric effects of the construct or its interaction with a receptor; and/or alters solubility of the construct. In some embodiments, the activity modifier is an Fc region or a modified Fc region or a short FcRnBP; and the linker comprise a hinge region, or is a linker comprising G and S residues. Exemplary of linkers are those that increase serum half-life of the construct. For example, the linker can have a sequence set forth in any of SEQ ID NOs: 812-834 or is a PEG moiety linker. In some embodiments, the construct comprises an activity modifier that is a modified Fc region or a peptide that increases serum half-life of the construct. The Fc region can be an Fc dimer; the Fc region can be modified to have reduced ADCC and/or CDC activity, such as an Fc modified to have reduced or no ADCC activity.

[0037] Included among the constructs provided herein are those in which the TNFR1 inhibitor is any as defined in the sequence listing, listed below, or known in the art; the Treg expander is any known in the art, a TNFR2 agonist, or any Treg expander set forth in the sequence listing, or known in the art; the linker is any listed in the sequence listing or below or known in the art; and the activity modifier is any set forth in the sequence listing, known in the art, and/or set forth below.

[0038] Provided are constructs that are TNFR1 antagonist constructs, comprising a TNFR1 inhibitor that is a single chain antibody or antigen-binding portion thereof that specifically targets and inhibits TNFR1, but does not antagonize TNFR2, thereby preventing transient activation of TNFR1 via receptor clustering. In such constructs that comprise an antibody or antigen-binding portion thereof, the antibody or antigen-binding fragment thereof can contain a modification that improves a pharmacological property and/or structure of the construct.

[0039] In any of the constructs provided herein, the constructs include component(s) that agonize(s) TNFR2 signaling to thereby increase expression of regulatory T cells (Tregs), thereby providing TNFR1 antagonism and concomitant (or substantially concomitant) increase in expression of Tregs. In the constructs provided herein, the TNFR1 inhibitor can be a single chain antibody that inhibits TNFR1 by inhibiting TNFR1 signaling, such as, for example, where the antibody portion or antigen binding portion of the construct inhibits binding of TNF-α binding to TNFR1. Among the constructs are those where the TNFR1 inhibitor is an antibody or antigen binding portion that does not inhibit binding of TNF-α to TNFR1, but does inhibit TNFR1 signaling. The property or activity that can be modulated/altered can be serum half-life.

[0040] The constructs can comprise an Fc modified to eliminate ADCC and/or CDC activity. The construct can comprise an Fc dimer, such as one in which one Fc monomer comprises holes, and the other comprises knobs, to form a heterodimer. For example, the knob mutation(s) is/are selected from among S354C, T366Y, T366W, and T394W by EU numbering; and the hole mutation(s) is/are selected from among Y349C, T366S, L368A, F405A, Y407T, Y407A, and Y407V by EU numbering, whereby the Fc monomers form the heterodimer. In some embodiments where the construct comprises an Fc, the Fc is from trastuzumab. The construct can be dimerized by fusion of the N-terminus with the C-terminus of trastuzumab.

[0041] In some embodiments in which the constructs comprise a linker the linker is or comprises a hinge region from an Fc region. For example, in which the hinge region is from trastuzumab, and it is linked to the Fc region. The constructs include those that comprise a linker that is linked to the anti-TNFR1 antagonist antibody or antigen-binding portion thereof. The linker can be linked to the anti-TNFR1 antagonist antibody or antigen-binding portion thereof, and directly or via a hinge region to an Fc region. The Fc region or modified Fc region, for example, comprises the sequence of amino acids set forth in any of SEQ ID NOs:10, 12, 14, 16, 27, 30, 1469, and 1470.

[0042] Also provided are constructs that bind to neonatal Fc receptor (FcRn). For example, provided are TNFR1 constructs that comprise a short FcRn-binding peptide (FcRnBP), where a short FcRn-binding peptide (FcRnBPs) provides for the interaction of the construct with FcRn, and contains 6-25, or 10-20 amino acid residues. For example, the FcRnBP contains 12-20 residues or 15 residues or 16 residues. Exemplary of these are TNFR1 antagonist constructs where the FcRn-binding peptide (FcRnBP) comprises or consists of a peptide of any SEQ ID NOs:48-51. The constructs include TNFR1 constructs that comprise an Fc heterodimer, where one Fc monomer comprises holes, and the other comprises knobs, whereby the Fc dimer that results is a heterodimer.

[0043] Provided are constructs that are TNFR1 antagonist constructs that comprise: a TNFR1 inhibitor; an Fc dimer; and a Treg expander, where: the Fc dimer comprises two complementary Fc monomers; the TNFR1 inhibitor is linked to one of the Fc monomer, and the Treg expander is linked to the other Fc monomer. In such constructs the Treg expander can be a TNFR2 agonist. They can further comprise a second Treg expander linked to the same Fc monomer as the TNFR1 inhibitor, where the first and second Treg expanders are the same or different. The second Treg expander can be a TNFR2 agonist. In some embodiments, the Treg expanders are the same. The TNFR1 inhibitor can be one that inhibits or blocks TNFR1 signaling. In some embodiments, the TNFR1 inhibitor binds to TNFR1 and blocks or inhibits TNF-a binding and TNFR1 signaling. In some embodiments, the TNFR1 inhibitor binds to TNFR1, does not or interfere with TNF-α binding, and blocks or inhibits TNFR1 signaling. In some embodiments of these constructs, the Treg expander is a TNFR2 agonist. The TNFR2 agonist can be one that stimulates or induces TNFR2 signaling. Exemplary of the Treg expanders is a TNFR2 agonist that is an scFv, VHH single domain antibody, or Fab of aTNFR2 agonist monoclonal antibody. In these constructs, the Treg expander can be a TNFR2 agonist that is a small molecule, or a nucleic acid aptamer, or a peptide aptamer.

[0044] Also provided are any of these constructs that is or also is a TNFR2 agonist. The TNFR2 agonist is a construct of formula 3a or 3b, where: formula 3a is (Treg expander)₁-linkerₚ-(activity modifier)_{q}, and formula 3b is (activity modifier)_{q}-linkerₚ-(Treg expander)ₙ. In these formulae, each of n and q is an integer, and each is independently 1, 2, or 3; p is 0, 1, 2 or 3; an activity modifier is a moiety that modulates or alters the activity or a pharmacological property of the construct compared to the construct in the absence of the activity modifier; and the linker increases flexibility of the construct, and/or moderates or reduces steric effects of the construct or its interaction with a receptor, and/or increases solubility in aqueous media of the construct. In any of these constructs, the Treg expander in the construct is a TNFR2 agonist. For example, the TNFR2 agonist stimulates or induces TNFR2 signaling. In other examples, the Treg expander is a TNFR2 agonist that is an scFv, VHH single domain antibody, or Fab of a TNFR2 agonist monoclonal antibody. The Treg expander can be a TNFR2 agonist that is a small molecule, or a nucleic acid, or peptide aptamer. In the constructs that comprise all or a portion of trastuzumab, such as the Fc portion and/or Fc and hinge region or modified forms thereof, the construct can be dimerized by N-terminal fusion with the C-terminus of trastuzumab.

[0045] Provided are constructs that comprise a TNFR1 inhibitor moiety linked via a central PEG linker to one more Treg expanders, or that comprise at least two TNFR1 inhibitors that are the same or different, or that comprise two Treg expanders that are the same or different. The constructs that comprise a PEG moiety, such as a central PEG linker can comprise a branched PEG moiety linking the TNFR1 inhibitor and one or more Treg expanders. Exemplary are those that have a structure selected from among formulae 4A to 4D:

[chemical structure]

[0046] n is 1 to 5;
[0047] R¹ is H or CH₃, or CH₂CH₃ or other C1-C5 alkyl
[0048] [symbol] is aTNFR1 inhibitor (TNFR1 antagonist);
[0049] [symbol] is a Treg expander; or

[chemical structure]

[0050] [symbol] is a TNFR1 inhibitor (TNFR1 antagonist)
[0051] [symbol] is a Treg expander;
[0052] n is 1 to 5; or

[chemical structure]

[0053] [symbol] is a TNFR1 inhibitor (TNFR1 antagonist), or a Treg expander; and
[0054] n is 1 to 5; or

[chemical structure]

wherein
[0055] each [symbol] is same or different and each is independently selected from a TNFR1 inhibitor (TNFR1 antagonist), and a TNFR2 agonist;
[0056] the activity modifier is optional, and can be linked to any suitable locus in the molecule; and n is 1 to 5.

[0057] In TNFR1 antagonist constructs and other constructs provided herein, the Treg expander can be a TNFR2 agonist. These constructs can include an activity modifier, such as, for example, where the activity modifier is an Fc region, or is an Fc region that includes a hinge region or other linker; and the Fc region or Fc region with hinge region is an Fc that is modified to reduce or eliminate ADCC and/or CDC activity. Exemplary thereof are constructs where the Fc or modified Fc is an IgG Fc or is an IgG1 or IgG4 Fc, and/or are constructs that bind to neonatal Fc receptor (FcRn). Exemplary of these constructs are those where: the construct comprises a short FcRn-binding peptide (FcRnBP), where the short FcRn-binding peptide (FcRnBPs) provides for the interaction of the construct with FcRn, and contains 6-25, such as 10-20 amino acid residues; or wherein the FcRnBP contains 12-20 residues or 15 residues or 16 residues, such as, for example where the FcRn-binding peptide (FcRnBP) comprises or consists of a peptide of any SEQ ID NOs:48-51.

[0058] Also provided are TNFR1 antagonist constructs of any of the formulae above and in the application that comprise: a) a TNFR1 inhibitor moiety that is a TNFR1-selective; b) optionally, one or more linkers; and c) optionally, a half-life extending moiety, where the antagonist construct comprises at least one of b) and c). In such constructs, the TNFR1-selective antagonist selectively binds and inhibits TNFR1 signaling, but not TNFR2 signaling. Additionally, as described herein, there resulting construct is one that does not have TNFR1 agonist activity. As exemplified, for example, in the Examples, the constructs designated 1206, such as the monovalent construct and the divalent construct, that contain the dAb from SEQ ID NO:59, linked via a polypeptide linker, to a modified Fc, do not exhibit agonist activity; whereas the corresponding construct, designated 1208, that contains the dAb from SEQ ID NO:54 has agonist activity. The dAb 019 construct does not have activity when tested with the dAb linked to human serum albumin (HSA).

[0059] As described for the constructs above, the TNFR1 inhibitor, linkers, and other components can be those as described above. These include constructs where the TNFR1 inhibitor that is a selective antagonist comprises an antigen-binding fragment that selectively binds and inhibits TNFR1 signaling but not TNFR2 signaling. For example, the antigen-binding fragment that selectively binds and inhibits TNFR1 signaling but not TNFR2 signaling can comprise a domain antibody (dAb), scFv, or Fab fragment. In any of the constructs described herein, the TNFR1 inhibitor comprises an antigen-binding fragment of a human anti-TNFR1 antagonist monoclonal antibody. For example, the human anti-TNFR1 antagonist monoclonal antibody is H398 that comprises SEQ ID NO:678, or ATROSAB, or an antigen binding portion thereof or a sequence having at least 95% sequence identity to SEQ ID NO:31 or 32 or 673 or 678 or an antigen-binding portion thereof that binds to TNFR1. Exemplary of TNFR1 inhibitors are those that comprise a domain antibody (dAb) or antigen binding portion thereof or comprises the sequence of amino acids set forth in any of SEQ ID NOs: 54-672 or a sequence having at least 95% sequence identity thereto that retains TNFR1 inhibitor activity; and/or comprise the scFv set forth in any of SEQ ID NOs:673-678 or variants of these polypeptides having at least 90% or 95% sequence identity thereto that retains TNFR1 inhibitor activity; and/or comprise the Fab set forth in any of SEQ ID NOs:679-682 or a sequence having at least 90% or 95% sequence identity thereto that retains TNFR1 inhibitor or binding activity; and/or comprises the nanobody whose sequence is set forth in SEQ ID NO: 683 or 684 or a sequence having at least 90% or 95% sequence identity thereto that retains TNFR1 inhibitor or binding activity.

[0060] Among the TNFR1 inhibitors, are those, for example, that comprise a dominant-negative tumor necrosis factor (DN-TNF) or TNF mutein, such as, for example, a DN-TNF or TNF mutein is a soluble TNF molecule, comprising one or more amino acid replacements that confer selective inhibition of TNFR1 and are selected from among:

[0061] V1M, L29S, L29G, L29Y, R31C, R31E, R31N, R32Y, R32W, C69V, A84S, V85T, S86T, Y87H, Q88N, T89Q, I97T, C101A, A145R, E146R, L29S/R32W, L29S/S86T, R32W/S86T, L29S/R32W/S86T, R31N/R32T, R31E/S86T, R31N/R32T/S86T, I97T/A145R, V1M/R31C/C69V/Y87H/C101A/A145R, and A84S/V85T/S86T/Y87H/Q88N/T89Q, with reference to the sequence of soluble TNF, set forth in SEQ ID NO:2. For example, the TNFR1 inhibitor is a TNF mutein that comprises the sequence of residues set forth in any one of SEQ ID NOs:701-703, or a sequence with at least or at least about 90% or 95% sequence identity to the sequence of residues set forth in any one of SEQ ID NOs:701-703 or fragment thereof that retains TNFR1 inhibitor activity. As described herein, the resulting constructs have the additional property, which can be identified by assay, that they do not have TNFR1 agonist activity.

[0062] Any of the foregoing constructs provided herein can include a linker, where the linker comprises all or a portion of the hinge sequence of trastuzumab, SCDKTH corresponding to residues 222-227 of SEQ ID NO:26 or up to the full sequence of the hinge region of trastuzumab, that contains or has the sequence EPKSCDKTHTCPPCP (corresponding to residues 219-233 of SEQ ID NO:26), or at least 5, 6, 7, 8, 9, 10, or 11 contiguous residues thereof, or residues ESKYGPPCPPCP, corresponding to residues 212-223 of SEQ ID NO:29, or a sequence having at least 98% or 99% sequence identity thereto that is a linker. For example, the construct can comprise a linker, where the linker comprises the sequence SCDKTH, corresponding to residues 222-227 of SEQ ID NO:26. The constructs can comprise in place of or in addition to another of the linkers, a linker that comprises glycine and serine (GS) residues, a GS linker. Exemplary GS linkers for any of the constructs provided herein include those selected from among (GlySer)ₙ, where n=1-10; (GlySer₂); (Gly₄Ser)ₙ, where n=1-10; (Gly₃Ser)ₙ, where n=1-5; (SerGly₄)ₙ, where n=1-5; (GlySerSerGly)ₙ, where n=1-5; GSGGSSGG; GSSSGSGSGSSG; GSSSGSGSGSSGG; GGSSGG; GGSSGGSGGSSSG; GSSSGSGSGGSSSGSGSG; GGSSGGSSGGGSSGGSSG; and GSSSGS. Also included are linkers that comprise a GS linker and all or a portion of the hinge sequence of trastuzumab, corresponding to residues EPKSCDKTHTCPPCP (corresponding to residues 219-233 of SEQ ID NO:26), for example, the linker can comprise a GS linker and comprise or contain only the sequence SCDKTH, corresponding to residues 217-222 of SEQ ID NO:31, from the hinge sequence. Such linkers include, for example, those that comprise a GS linker and all or a portion of the hinge sequence of nivolumab, corresponding to residues 212-223 of SEQ ID NO:29.

[0063] The constructs herein can contain an activity modifier. The activity modifiers include any described herein, including those described above, and below, and others known to those of skill in the art; the activity modifier alters and activity or property of the construct. The activity modified can be one that is a half-life extending moiety that is an IgG Fc, a polyethylene glycol (PEG) molecule, or human serum albumin (HSA). Examples of an IgG Fc is an IgG1 or IgG4 Fc. The IgG1 Fc can be the Fc of trastuzumab, set forth in SEQ ID NO:27 or a sequence of amino acids having at least 95% sequence identity therewith; the IgG4 Fc can be the Fc of nivolumab, set forth in SEQ ID NO:30 or a sequence of amino acids having at least 95% sequence identity therewith. For example, the IgG1 Fc is the Fc of human IgG1, set forth in SEQ ID NO:10, and the IgG4 Fc is the Fc of human IgG4, set forth in SEQ ID NO:16.

[0064] The constructs described herein include those that are TNFR1 inhibitors or comprise a TNFR1 inhibitor(s). These include constructs where the TNFR1 inhibitor is monovalent. These can include linkers, such as where the linker comprises (Gly₄Ser)₃, and/or linkers that comprise (Gly₄Ser)₃ and SCDKTH (residues 217-222 of SEQ ID NO:31); and/or linkers that comprise (Gly₄Ser)₃ and the hinge sequence of trastuzumab, corresponding to residues 219-233 of SEQ ID NO:26; and/or those that comprise (Gly₄Ser)₃ and the hinge sequence of nivolumab, corresponding to residues 212-223 of SEQ ID NO:29. Exemplary of constructs provided herein that inhibit TNFR1 are those that comprise the sequence of residues set forth in any of SEQ ID NOs:704-764, or a construct that inhibits TNFR1 and has a sequence with at least or at least about 95% sequence identity to the sequence of residues set forth in any one of SEQ ID NOs:704-764.

[0065] Provided herein are TNFR1 antagonist constructs. These include those where the TNFR1 construct comprises a short FcRn-binding peptide (FcRnBP); and the short FcRn-binding peptide (FcRnBPs) provides for the interaction of the construct with FcRn, and contains 6-25, such as 10-20 amino acid residues, such as for, example, those where the FcRnBP contains 12-20 residues or 15 residues or 16 residues, such as, for example those where the FcRn-binding peptide (FcRnBP) comprises a peptide of any SEQ ID NOs:48-51 or a peptide having at least about 95% sequence identity therewith, or an FcRn-binding peptide (FcRnBP) that includes a peptide of any SEQ ID NOs:48-51.

[0066] Other exemplary TNFR1-inhibiting constructs provided herein include constructs that comprise: a) a domain antibody that inhibits TNFR1; b) a linker that increases flexibility; reduces steric effects, or increases solubility; and c) a half-life extending moiety. Included are such constructs where the half-life extending moiety is not a human serum albumin antibody or an unmodified Fc. These constructs include those that are a TNFR1 antagonist, comprising: a) the domain antibody (dAb) of any of SEQ ID NOs:52-672, or the scFv of any of SEQ ID NOs:673-678 or the Fab of any of SEQ ID NOs:679-682, or the nanobody of SEQ ID NO: 683 or 684, or the TNF mutein of any of SEQ ID NOs:685-703; b) a GS linker selected from among (GlySer)ₙ, where n=1-10; (GlySer₂); (Gly₄Ser)ₙ, where n=1-10; (Gly₃Ser)ₙ, where n=1-5; (SerGly₄)ₙ, where n=1-5; (GlySerSerGly)ₙ, where n=1-5; GSGGSSGG; GSSSGSGSGSSG; GSSSGSGSGSSGG; GGSSGG; GGSSGGSGGSSSG; GSSSGSGSGGSSSGSGSG; GGSSGGSSGGGSSGGSSG; and GSSSGS; and c) a half-life extending moiety that is an IgG Fc. In these constructs, or any provided herein that include one or more of these components, the GS linker can be (GGGGS)₃; and the IgG Fc can be the Fc of trastuzumab or the Fc of nivolumab.

[0067] Others of the constructs provided herein that are TNFR1 antagonist constructs include constructs comprising: a) the domain antibody (dAb) of any of SEQ ID NOs:52-672, or the scFv of any of SEQ ID NOs:673-678 or the Fab of any of SEQ ID NOs:679-682, or the nanobody of SEQ ID NO: 683 or 684, or the TNF mutein of any of SEQ ID NOs:685-703; b) a linker selected from among all or a portion of the hinge sequence of trastuzumab and all or a portion of the hinge sequence of nivolumab; and c) a half-life extending moiety that is an IgG Fc. In such constructs, the linker can comprise all or a portion of the hinge sequence of trastuzumab, where the IgG Fc is the Fc of trastuzumab. In other embodiments, the linker can comprise all or a portion of the hinge sequence of nivolumab, where the IgG Fc is the Fc of nivolumab.

[0068] Provided are any of the constructs provided herein that is a TNFR1 antagonist construct, comprising:
[0069] a) the domain antibody (dAb) of any of SEQ ID NOs:52-672, or the scFv of any of SEQ ID NOs:673-678 or the Fab of any of SEQ ID NOs:679-682, or the nanobody of SEQ ID NO: 683 or 684, or the TNF mutein of any of SEQ ID NOs:685-703;
[0070] b) a first linker that is a GS linker selected from among (GlySer)ₙ, where n=1-10; (GlySer₂); (Gly₄Ser)ₙ, where n=1-10; (Gly₃Ser)ₙ, where n=1-5; (SerGly₄)ₙ, where n=1-5; (GlySerSerGly)ₙ, where n=1-5; GSGGSSGG; GSSSGSGSGSSG; GSSSGSGSGSSGG; GGSSGG; GGSSGGSGGSSSG; GSSSGSGSGGSSSGSGSG; GGSSGGSSGGGSSGGSSG; and GSSSGS;
[0071] c) a second linker selected from among all or a portion of the hinge sequence of trastuzumab and all or a portion of the hinge sequence of nivolumab; and
[0072] d) a half-life extending moiety that is an IgG Fc.

[0073] In some embodiments, these constructs can contain a first linker that is a GS linker is (GGGGS)₃; and a second linker comprises the sequence SCDKTH (residues 217-222 of SEQ ID NO:31); and the IgG Fc is the Fc of trastuzumab. In other embodiments, the first linker is the GS linker is (GGGGS)₃; the second linker comprises all or a portion of the hinge sequence of nivolumab; and the IgG Fc is the Fc of nivolumab.

[0074] Provided are the constructs that are TNFR1 antagonists that comprise:
[0075] a) the domain antibody (dAb) of any of SEQ ID NOs:52-672, or the scFv of any of SEQ ID NOs:673-678 or the Fab of any of SEQ ID NOs:679-682, or the nanobody of SEQ ID NO: 683 or 684, or the TNF mutein of any of SEQ ID NOs:685-703;
[0076] b) a GS linker selected from among (GlySer)ₙ, where n=1-10; (GlySer₂); (Gly₄Ser)ₙ, where n=1-10; (Gly₃Ser)ₙ, where n=1-5; (SerGly₄)ₙ, where n=1-5; (GlySerSerGly)ₙ, where n=1-5; GSGGSSGG; GSSSGSGSGSSG; GSSSGSGSGSSGG; GGSSGG; GGSSGGSGGSSSG; GSSSGSGSGGSSSGSGSG; GGSSGGSSGGGSSGGSSG; and GSSSGS; and
[0077] c) a half-life extending moiety that is a PEG molecule. The GS linker can be any described herein or known to those of skill in the art, such as (GGGGS)₃. The PEG molecule can be one that has a molecular weight of at least 25 kDa, generally at least 30 kDa or more, such as at least 40 kDa or 50 kDa, or 60 kDa, or 80 kDa, or more.

[0078] Provided are the constructs that are TNFR1 antagonist constructs, comprising:
[0079] a) the domain antibody (dAb) of any of SEQ ID NOs:52-672, or the scFv of any of SEQ ID NOs:673-678, or the Fab of any of SEQ ID NOs:679-682, or the nanobody of SEQ ID NO: 683 or 684, or the TNF mutein of any of SEQ ID NOs:685-703;
[0080] b) a GS linker selected from among (GlySer)ₙ, where n=1-10; (GlySer₂); (Gly₄Ser)ₙ, where n=1-10; (Gly₃Ser)ₙ, where n=1-5; (SerGly₄)ₙ, where n=1-5; (GlySerSerGly)., where n=1-5; GSGGSSGG; GSSSGSGSGSSG; GSSSGSGSGSSGG; GGSSGG; GGSSGGSGGSSSG; GSSSGSGSGGSSSGSGSG; GGSSGGSSGGGSSGGSSG; and GSSSGS; and
[0081] c) a half-life extending moiety that is human serum albumin. Exemplary of the linkers are any described herein, such as where the GS linker is (GGGGS)₃.

[0082] The primary amino acid sequence of any of the constructs provided herein (those described above, and below) can be optimized or modified to eliminate immunogenic sequences or immunogenic epitopes. For example, in constructs that contain an IgG Fc, the IgG Fc can be modified to comprise one or more of the following modifications: a) a modification(s) to introduce knobs-into-holes; b) a modification(s) to increase or enhance neonatal Fc receptor (FcRn) recycling; and c) a modification(s) to reduce or eliminate immune effector functions. In such constructs and in any that contain an IgG Fc the knob mutation can be selected from among S354C, T366Y, T366W, and T394W by EU numbering; and the hole mutation is selected from among Y349C, T366S, L368A, F405A, Y407T, Y407A, and Y407V by EU numbering. These TNFR1 antagonist constructs can be one where the modification(s) to increase or enhance FcRn recycling is selected from among one or more of: T250Q, T250R, M252F, M252W, M252Y, S254T, T256D, T256E, T256Q, V259I, V308F, E380A, M428L, H433K, N434F, N434A, N434W, N434S, N434Y, Y436H, M252Y/T256Q, M252F/T256D, M252Y/S254T/T256E, H433K/N434F/Y436H, N434F/Y436H, T250Q/M428L, T250R/M428L, M428L/N434S, V259I/V308F, V259I/V308F/M428L, E294del/T307P/N434Y, and T256N/A378V/S383N/N434Y, by EU numbering. The TNFR1 antagonist constructs that can be modified to reduce or eliminate immune effector function(s), such as immune effector function(s) that is/are selected from among one or more of complement-dependent cytotoxicity (CDC), antibody-dependent cell-mediated cytotoxicity (ADCC), and antibody-dependent cell-mediated phagocytosis (ADCP).

[0083] For example, in these TNFR1 antagonist constructs, the modification(s) to reduce or eliminate immune effector functions are selected from among one or more of: in IgG1: L235E, L234A/L235A, L234E/L235F/P331S, L234F/L235E/P331S, L234A/L235A/P329G, L234A/L235A/G237A/P238S/H268A/A330S/P331S, G236R/L328R, G237A, E318A, D265A, E233P, N297A, N297Q, N297D, N297G, N297G/D265A, A330L, D270A, P329A, P331A, K322A, V264A, and F241A, by EU numbering; and in IgG4: L235E, F234A/L235A, S228P/L235E, and S228P/F234A/L235A, by EU numbering.

[0084] The TNFR1 antagonist or multispecific constructs can comprise a central PEG linker moiety; and the construct can comprise a modified Fc region, such as those described above, where Fc region is a modified IgG Fc and the modified IgG Fc comprises one or more of the following modifications:
[0085] a) a modification(s) to introduce knobs-into-holes, wherein:
   [0086] the knob mutation is selected from among S354C, T366Y, T366W, and T394W by EU numbering; and
   [0087] the hole mutation is selected from among Y349C, T366S, L368A, F405A, Y407T, Y407A, and Y407V by EU numbering;
[0088] b) a modification(s) to increase or enhance neonatal Fc receptor (FcRn) recycling, wherein the modification is selected from among one or more of: T250Q, T250R, M252F, M252W, M252Y, S254T, T256D, T256E, T256Q, V259I, V308F, E380A, M428L, H433K, N434F, N434A, N434W, N434S, N434Y, Y436H, M252Y/T256Q, M252F/T256D, M252Y/S254T/T256E, H433K/N434F/Y436H, N434F/Y436H, T250Q/M428L, T250R/M428L, M428L/N434S, V259I/V308F, V259I/V308F/M428L, E294del/T307P/N434Y, and T256N/A378V/S383N/N434Y, by EU numbering; and
[0089] c) a modification(s) to increase or enhance one or more immune effector functions, wherein:
   [0090] the immune effector function(s) is/are selected from among one or more of CDC, ADCC and ADCP; and
   [0091] the modification(s) to increase or enhance an immune effector function is/are selected from among one or more of:
   [0092] in IgG1: S239D, 1332E, S239D/I332E, S239D/A330L/I332E, S298A/E333A/K334A; F243L/R292P/Y300L/V305I/P396L; L235V/F243L/R292P/Y300L/P396L; F243L/R292P/Y300L; L234Y/G236W/S298A in the first heavy chain and S239D/A330L/I332E in the second heavy chain; L234Y/L235Q/G236W/S239M/H268D/D270E/S298A in the first heavy chain and D270E/K326D/A330M/K334E in the second heavy chain; A327Q/P329A; D265A/S267A/H268A/D270A/K326A/S337A; T256A/K290A/S298A/E333A/K334A; G236A; G236A/1332E; G236A/S239D/I332E; G236A/S239D/A330L/I332E; introduction of a biantennary glycan at residue N297; introduction of an afucosylated glycan at residue N297; K326W; K326A; E333A; K326A/E333A; K326W/E333S; K326M/E333S; K222W/T223W; K222W/T223W/H224W; D221W/K222W; C220D/D221C; C220D/D221C/K222W/T223W; H268F/S324T; S267E; H268F; S324T; S267E/H268F/S324T; G236A/I332E/S267E/H268F/S324T; E345R; and E345R/E430G/S440Y; by EU numbering.

[0093] In some embodiments, of any of the constructs that comprises an Fc region, the construct can comprise an IgG1 Fc that comprises one or more modifications to increase binding to the inhibitory Fcγ receptor (FcγR) FcγRIIb. For example, the modification or modifications that increase binding to FcγRIIb is/are selected from among one or more of S267E, N297A, L328F, L351S, T366R, L368H, P395K, S267E/L328F and L351S/T366R/L368H/P395K, by EU numbering.

[0094] The constructs can include linker, such as:
[0095] a) a GS linker selected from among (GlySer)ₙ, where n=1-10; (GlySer₂); (Gly₄Ser)ₙ, where n=1-10; (Gly₃Ser)ₙ, where n=1-5; (SerGly₄)ₙ, where n=1-5; (GlySerSerGly)ₙ, where n=1-5; GSGGSSGG; GSSSGSGSGSSG; GSSSGSGSGSSGG; GGSSGG; GGSSGGSGGSSSG; GSSSGSGSGGSSSGSGSG; GGSSGGSSGGGSSGGSSG; and GSSSGS; and
[0096] b) an activity modifier that is a half-life extending moiety that is an IgG Fc modified as detailed herein. In exemplary embodiments, the GS linker can be (GGGGS)₃; and the IgG Fc is the Fc of trastuzumab or the Fc of nivolumab.
[0097] c) a second linker selected from among all or a portion of the hinge sequence of trastuzumab and all or a portion of the hinge sequence of nivolumab; and
[0098] d) an activity modifier that is a half-life extending moiety that is an IgG Fc.

[0099] Exemplary of such constructs are those in which the first GS linker is (GGGGS)₃, and the second linker comprises the sequence SCDKTH (residues 217-222 of SEQ ID NO:31); and the IgG Fc is the Fc of trastuzumab. In other embodiments, the first linker is (GGGGS)₃, the second linker comprises all or a portion of the hinge sequence of nivolumab; and the IgG Fc is the Fc of nivolumab.

[0100] Provided are TNFR1 antagonist constructs, TNFR1antagonsit-TNFR2 agonist constructs, where the IgG Fc is a monomer or a dimer. The constructs provided herein can comprise a dAb (or a Vhh). The constructs can comprise a Vhh single chain or double chain containing a dAb. These constructs can contain HSA linked to the dAb directly or via a linker. They HSA and dAb can be linked in any order, such as the C-terminus of the dAb linked directly or via a linker, such as any described above, to the N-terminus of HSA. Exemplary of such constructs are those that comprise:
[0101] a) residues 20-732, which is the dAb Dom1h-131-206 of SEQ ID NO:59, linked via a linker to HSA, as set forth in SEQ ID NO:1475, or a construct having at least 95%, 96%, 97%, 98%, 99% sequence identity to the construct of SEQ ID NO:1475 or to residues 20-732 of SEQ ID NO:1475 and having TNFR1 antagonist activity; or
[0102] b) a dAb set forth in in any of SEQ ID NOs: 53-83 and 503-671, and variants thereof having at least 95%, 96%, 97%, 98%, 99% sequence identity thereto, whereby the construct has TNFR1 antagonist activity; or
[0103] c) a dAb that has the sequence set forth in any of SEQ ID NOs:57-59 and variants thereof have at least 95% sequence identity thereto, whereby the construct has TNFR1 antagonist activity; or
[0104] d) the dAb is designated DOM1 h-131-206 of SEQ ID NO:59 and variants thereof that have at least 95%, 96%, 97%, 98%, 99% sequence identity thereto, and have TNFR1 antagonist activity; or
[0105] e) combinations of any of a)-d); or
[0106] f) humanized sequences of any of a)-f) or where a sufficient portion of the construct for administration to a human is humanized, where a sufficient portion is sufficient to eliminate or reduce any immune response to the construct when administered to a human.

[0107] The constructs provided herein that are TNFR1 constructs can further comprise a TNFR2 agonist or the construct can be a TNFR2 agonist construct. In the constructs that comprise a TNFR2 agonist, the TNFR2 agonist can be modified to eliminate sequences of amino acids or epitopes that are immunogenic in the subject to be treated, such as for administration to a human subject. In the constructs that contain TNFR2 agonist, it can be a TNFR2-selective agonist. These constructs can comprise a modified IgG Fc. For example, the IgG Fc can comprise one or more of the following modifications:
[0108] a) a modification(s) to introduce knobs-into-holes;
[0109] b) a modification(s) to increase or enhance neonatal Fc receptor (FcRn) recycling; and
[0110] c) a modification(s) to reduce or eliminate immune effector functions, selected from among one or more of complement-dependent cytotoxicity (CDC), antibody-dependent cell-mediated cytotoxicity (ADCC) and antibody-dependent cell-mediated phagocytosis (ADCP). Exemplary of such modifications are:
[0111] a) a modification(s) to introduce knobs-into-holes are selected from:
[0112] one or more knob mutations selected from among S354C, T366Y, T366W, and T394W by EU numbering; and
[0113] one or more hole mutations selected from among Y349C, T366S, L368A, F405A, Y407T, Y407A, and Y407V by EU numbering, whereby the Fc forms a dimer;
[0114] b) the modification(s) to increase or enhance FcRn recycling is selected from among one or more of T250Q, T250R, M252F, M252W, M252Y, S254T, T256D, T256E, T256Q, V259I, V308F, E380A, M428L, H433K, N434F, N434A, N434W, N434S, N434Y, Y436H, M252Y/T256Q, M252F/T256D, M252Y/S254T/T256E, H433K/N434F/Y436H, N434F/Y436H, T250Q/M428L, T250R/M428L, M428L/N434S, V259I/V308F, V259I/V308F/M428L, E294del/T307P/N434Y, and T256N/A378V/S383N/N434Y, by EU numbering; and
[0115] c) the modification(s) to reduce or eliminate immune effector functions are selected from among one or more of:
   [0116] in IgG1: L235E, L234A/L235A, L234E/L235F/P331S, L234F/L235E/P331S, L234A/L235A/P329G, L234A/L235A/G237A/P238S/H268A/A330S/P331S, G236R/L328R, G237A, E318A, D265A, E233P, N297A, N297Q, N297D, N297G, N297G/D265A, A330L, D270A, P329A, P331A, K322A, V264A, and F241A, by EU numbering; and
   [0117] in IgG4: L235E, F234A/L235A, S228P/L235E, and S228P/F234A/L235A, by EU numbering.

[0118] Constructs provided herein include TNFR2 agonist constructs that contain a modified IgG Fc, where the IgG Fc comprises one or more of the following modifications:
[0119] a) one or more modification(s) to introduce knobs-into-holes, wherein:
   [0120] the knob mutation is selected from among S354C, T366Y, T366W, and T394W by EU numbering; and
   [0121] the hole mutation is selected from among Y349C, T366S, L368A, F405A, Y407T, Y407A, and Y407V by EU numbering;
[0122] b) a modification(s) to increase or enhance neonatal Fc receptor (FcRn) recycling, wherein the modification is selected from among one or more of:
   [0123] T250Q, T250R, M252F, M252W, M252Y, S254T, T256D, T256E, T256Q, V259I, V308F, E380A, M428L, H433K, N434F, N434A, N434W, N434S, N434Y, Y436H, M252Y/T256Q, M252F/T256D, M252Y/S254T/T256E, H433K/N434F/Y436H, N434F/Y436H, T250Q/M428L, T250R/M428L, M428L/N434S, V259I/V308F, V259I/V308F/M428L, E294del/T307P/N434Y, and T256N/A378V/S383N/N434Y, by EU numbering; and
[0124] c) a modification(s) to increase or enhance immune effector functions, wherein:
   [0125] the immune effector functions are selected from among one or more of CDC, ADCC and ADCP; and
   [0126] the modification(s) in to increase or enhance immune effector functions is selected from among one or more of:
      [0127] in IgG1: S239D, 1332E, S239D/I332E, S239D/A330L/I332E, S298A/E333A/K334A; F243L/R292P/Y300L/V305I/P396L; L235V/F243L/R292P/Y300L/P396L; F243L/R292P/Y300L; L234Y/G236W/S298A in the first heavy chain and S239D/A330L/I332E in the second heavy chain; L234Y/L235Q/G236W/S239M/H268D/D270E/S298A in the first heavy chain and D270E/K326D/A330M/K334E in the second heavy chain; A327Q/P329A; D265A/S267A/H268A/D270A/K326A/S337A; T256A/K290A/S298A/E333A/K334A; G236A; G236A/I332E; G236A/S239D/I332E; G236A/S239D/A330L/I332E; introduction of a biantennary glycan at residue N297; introduction of an afucosylated glycan at residue N297; K326W; K326A; E333A; K326A/E333A; K326W/E333S; K326M/E333S; K222W/T223W; K222W/T223W/H224W; D221W/K222W; C220D/D221C; C220D/D221C/K222W/T223W; H268F/S324T; S267E; H268F; S324T; S267E/H268F/S324T; G236A/I332E/S267E/H268F/S324T; E345R; and E345R/E430G/S440Y; by EU numbering.

[0128] The constructs provided herein that are TNFR2 agonist construct can comprise a modified IgG1 Fe, such as where the Fc is modified to increase binding to the inhibitory Fcγ receptor (FcγR) FcγRIIb, which can include modifications that increase binding to FcγRIIb. Exemplary of such modifications are those selected from among one or more of S267E, N297A, L328F, L351S, T366R, L368H, P395K, S267E/L328F and L351S/T366R/L368H/P395K, by EU numbering.

[0129] These constructs comprise a modified Fc, wherein the IgG Fc comprises one or more of the following modifications:
[0130] a) a modification(s) to introduce knobs-into-holes;
[0131] b) a modification(s) to increase or enhance neonatal Fc receptor (FcRn) recycling; and
[0132] c) a modification(s) to reduce or eliminate immune effector functions.

[0133] Exemplary of the Fc that comprise knobs-into-holes modifications are:
[0134] the knob mutation is selected from among one or more of S354C, T366Y, T366W, and T394W by EU numbering; and
[0135] the hole mutation is selected from among one or more of Y349C, T366S, L368A, F405A, Y407T, Y407A, and Y407V by EU numbering.

[0136] Other examples are multi-specific constructs that comprise an Fc, such as where the Fc comprises modifications to increase or enhance FcRn recycling is/are selected from among one or more of T250Q, T250R, M252F, M252W, M252Y, S254T, T256D, T256E, T256Q, V259I, V308F, E380A, M428L, H433K, N434F, N434A, N434W, N434S, N434Y, Y436H, M252Y/T256Q, M252F/T256D, M252Y/S254T/T256E, H433K/N434F/Y436H, N434F/Y436H, T250Q/M428L, T250R/M428L, M428L/N434S, V259I/V308F, V259I/V308F/M428L, E294del/T307P/N434Y, and T256N/A378V/S383N/N434Y, by EU numbering. The Fc can comprise modifications to immune effector functions that are selected from among one or more of complement-dependent cytotoxicity (CDC), antibody-dependent cell-mediated cytotoxicity (ADCC) and antibody-dependent cell-mediated phagocytosis (ADCP). The Fc can comprise modification(s) to reduce or eliminate immune effector functions in IgG1 and/or IgG4:
[0137] in IgG1: L235E, L234A/L235A, L234E/L235F/P331S, L234F/L235E/P331S, L234A/L235A/P329G, L234A/L235A/G237A/P238S/H268A/A330S/P331S, G236R/L328R, G237A, E318A, D265A, E233P, N297A, N297Q, N297D, N297G, N297G/D265A, A330L, D270A, P329A, P331A, K322A, V264A, and F241A, by EU numbering; and/or
[0138] in IgG4: L235E, F234A/L235A, S228P/L235E, and S228P/F234A/L235A, by EU numbering.

[0139] The IgG Fc can comprise one or more of the following modifications:
[0140] a) a modification(s) to introduce knobs-into-holes, wherein:
   [0141] the knob mutation is selected from among one or more of S354C, T366Y, T366W, and T394W by EU numbering; and
   [0142] the hole mutation is selected from among one or more of Y349C, T366S, L368A, F405A, Y407T, Y407A, and Y407V by EU numbering;
[0143] b) a modification(s) to increase or enhance neonatal Fc receptor (FcRn) recycling, wherein the modification is selected from among one or more of:
   [0144] T250Q, T250R, M252F, M252W, M252Y, S254T, T256D, T256E, T256Q, V259I, V308F, E380A, M428L, H433K, N434F, N434A, N434W, N434S, N434Y, Y436H, M252Y/T256Q, M252F/T256D, M252Y/S254T/T256E, H433K/N434F/Y436H, N434F/Y436H, T250Q/M428L, T250R/M428L, M428L/N434S, V259I/V308F, V259I/V308F/M428L, E294del/T307P/N434Y, and T256N/A378V/S383N/N434Y, by EU numbering; and
[0145] c) a modification(s) to increase or enhance immune effector functions, wherein:
   [0146] the immune effector functions are selected from among one or more of CDC, ADCC and ADCP; and
   [0147] the modification(s) in to increase or enhance immune effector functions is selected from among one or more of:
      [0148] in IgG1: S239D, 1332E, S239D/I332E, S239D/A330L/I332E, S298A/E333A/K334A; F243L/R292P/Y300L/V305I/P396L; L235V/F243L/R292P/Y300L/P396L; F243L/R292P/Y300L; L234Y/G236W/S298A in the first heavy chain and S239D/A330L/I332E in the second heavy chain; L234Y/L235Q/G236W/S239M/H268D/D270E/S298A in the first heavy chain and D270E/K326D/A330M/K334E in the second heavy chain; A327Q/P329A; D265A/S267A/H268A/D270A/K326A/S337A; T256A/K290A/S298A/E333A/K334A; G236A; G236A/I332E; G236A/S239D/I332E; G236A/S239D/A330L/I332E; introduction of a biantennary glycan at residue N297; introduction of an afucosylated glycan at residue N297; K326W; K326A; E333A; K326A/E333A; K326W/E333 S; K326M/E333 S; K222W/T223W; K222W/T223W/H224W; D221W/K222W; C220D/D221C; C220D/D221C/K222W/T223W; H268F/S324T; S267E; H268F; S324T; S267E/H268F/S324T; G236A/1332E/S267E/H268F/S324T; E345R; and E345R/E430G/S440Y; by EU numbering.

[0149] Other of such multi-specific constructs are those where: the construct that comprises an IgG1 Fc that is modified to increase binding to the inhibitory Fcγ receptor (FcγR) FcγRIIb. Exemplary of such are those where the modifications that increase binding to FcγRIIb are selected from among one or more of S267E, N297A, L328F, L351S, T366R, L368H, P395K, S267E/L328F and L351S/T366R/L368H/P395K, by EU numbering.

[0150] Also provided are constructs that are a multi-specific TNFR1 antagonist/TNFR2 agonist, the TNFR1 inhibitor (antagonist) is monovalent; and the TNFR2 agonist is monovalent. Also provided are multi-specific constructs that are a multi-specific TNFR1 antagonist/TNFR2 agonist constructs, where the TNFR1 antagonist is monovalent; and the TNFR2 agonist is bivalent. As with all of the constructs provided the TNFR1 antagonist does not exhibit TNFR1 agonist activity.

[0151] In some embodiments, the multi-specific constructs are multi-specific TNFR1 antagonist/TNFR2 agonist constructs, where:
[0152] a) the TNFR1 antagonist is selected from:
   [0153] i) an antigen-binding fragment of a human anti-TNFR1 antagonist monoclonal antibody selected from H398 or ATROSAB; or
   [0154] ii) the domain antibody (dAb) of any of SEQ ID NOs:52-672, or the scFv of any of SEQ ID NOs:673-678, or the Fab of any of SEQ ID NOs:679-682, or the nanobody of SEQ ID NO: 683 or 684, or the TNF mutein of any of SEQ ID NOs:701-703, or a sequence with at least or at least about 95% sequence identity thereto; or
   [0155] iii) a dominant-negative tumor necrosis factor (DN-TNF) or TNF mutein comprising a soluble TNF molecule, with one or more amino acid replacements that confer selective inhibition of TNFR1 and are selected from among:
      [0156] VIM, L29S, L29G, L29Y, R31C, R31E, R31N, R32Y, R32W, C69V, A84S, V85T, S86T, Y87H, Q88N, T89Q, I97T, C101A, A145R, E146R, L29S/R32W, L29S/S86T, R32W/S86T, L29S/R32W/S86T, R31N/R32T, R31E/S86T, R31N/R32T/S86T, I97T/A145R, V1M/R31C/C69V/Y87H/C101A/A145R, and A84S/V85T/S86T/Y87H/Q88N/T89Q, with reference to the sequence of soluble TNF, set forth in SEQ ID NO:2;
[0157] b) the linker is a branched chain PEG molecule that is at least or at least about 30 kDa in size; and
[0158] c) the TNFR2 agonist is selected from:
   [0159] i) an antigen-binding fragment that binds to one or more epitopes within human TNFR2 that is selected from among the epitopes set forth in SEQ ID NOs:839-865, 1202 and 1204; or
   [0160] ii) an antigen-binding fragment of an agonistic human anti-TNFR2 antibody selected from MR2-1 or MAB2261; or
   [0161] iii) a TNFR2-selective TNF mutein that is a soluble TNF variant comprising one or more TNFR2-selective mutations selected from among K65W, D143Y, D143F, D143N, D143E, D143W, D143V, A145R, A145H, A145K, A145F, A145W, E146Q, E146H, E146K, E146N, D143N/A145R, A145R/S147T, Q88N/T89S/A145S/E146A/S147D, Q88N/A1451/E146G/S147D, A145H/E146S/S147D, A145H/S147D, L29V/A145D/E146D/S147D, A145N/E146D/S147D, A145T/E146S/S147D, A145Q/E146D/S147D, A145T/E146D/S147D, A145D/E146G/S147D, A145D/S147D, A145K/E146D/S147T, A145R/E146T/S147D, A145R/S147T, E146D/S147D, D143V/F144L/A145S, S95C/G148C, and D143V/A145S, with reference to SEQ ID NO:2; or
   [0162] iv) a single-chain TNFR2-selective TNF mutein trimer, comprising the mutations D143N/A145R, wherein the TNF muteins are linked by (GGGGS)ₙ, where n=1-5, or all or a portion of the stalk region of TNF (SEQ ID NO:812); or
   [0163] v) a TNFR2-selective agonist comprising the formula:
   [0164] MD-L1-TNFmut-L2-TNFmut-L3-TNFmut (Formula II); or
   [0165] TNFmut-L1-TNFmut-L2-TNFmut-L3-MD (Formula III);
   [0166] whereby MD is a multimerization domain; TNFmut is a TNFR2-selective TNF mutein; and L1, L2 and L3 are linkers that can be the same or different, and wherein:
      [0167] the MD is selected from EHD2 (SEQ ID NO:808), MHD2 (SEQ ID NO:811), the trimerization domain of chicken tenascin C (TNC) (residues 110-139 of SEQ ID NO:804; SEQ ID NO:805), or the trimerization domain of human TNC (residues 110-139 of SEQ ID NO:806, SEQ ID NO:807);
      [0168] L1, L2 and L3 each are (GGGGS)ₙ, where n=1-5, or all or a portion of the stalk region of TNF (SEQ ID NO:812), or a mixture thereof; and
      [0169] the TNF muteins comprise the TNFR2-selective mutations D143N/A145R.

[0170] Also provided are multi-specific constructs where each of the TNFR1 antagonist and TNFR2 agonist is monovalent. Also provided are such constructs where the TNFR1 antagonist is monovalent, and the TNFR2 agonist is bivalent.

[0171] The constructs provided herein can be used for treatments and uses for treatment of various diseases, disorders, and conditions. Provided are the multi-specific constructs that are multi-specific TNFR1 antagonist/TNFR2 agonist, for use for the treatment of a chronic inflammatory, autoimmune, neurodegenerative, demyelinating or respiratory disease or disorder, or a disease, condition or disorder characterized by overexpression of TNF or deregulated TNFR1 signaling in its etiology. Uses of multi-specific TNFR1 antagonist/TNFR2 agonist constructs for the treatment of a chronic inflammatory, autoimmune, neurodegenerative, demyelinating or respiratory disease or disorder, or a disease, condition or disorder characterized by overexpression of TNF or deregulated TNFR1 signaling in its etiology are provided.

[0172] Also provided are compositions, comprising a construct of any of the constructs provided herein in a pharmaceutically acceptable carrier or vehicle. These compositions can be used for or in methods of treatment of diseases, disorders, and conditions, such as, but not limited to, a chronic inflammatory, autoimmune, neurodegenerative, demyelinating or respiratory disease or disorder, and a disease, condition or disorder characterized by overexpression of TNF or deregulated TNFR1 signaling in its etiology. Exemplary diseases, disorders, and conditions, are inflammatory, autoimmune, neurodegenerative, demyelinating or respiratory diseases or disorders, and diseases, disorders, and conditions characterized by overexpression of TNF or deregulated TNFR1 signaling in its etiology. These include diseases, disorders, and conditions selected from: rheumatoid arthritis (RA), psoriasis, psoriatic arthritis, juvenile idiopathic arthritis (JIA), spondyloarthritis, ankylosing spondylitis, Crohn's disease, ulcerative colitis, inflammatory bowel disease (IBD), uveitis, fibrotic diseases, endometriosis, lupus, multiple sclerosis (MS), congestive heart failure, cardiovascular disease, myocardial infarction (MI), atherosclerosis, metabolic diseases, cytokine release syndrome, septic shock, sepsis, acute respiratory distress syndrome (ARDS), severe acute respiratory syndrome (SARS), SARS-CoV-2, influenza, acute and chronic neurodegenerative diseases, demyelinating diseases and disorders, stroke, Alzheimer's disease, Parkinson's disease, Behget's disease, Dupuytren's disease, Tumor Necrosis Factor Receptor-Associated Periodic Syndrome (TRAPS), pancreatitis, type I diabetes, chronic obstructive pulmonary disease (COPD), chronic bronchitis, emphysema, graft rejection, graft versus host disease (GvHD), lung inflammation, pulmonary diseases and conditions, asthma, cystic fibrosis, idiopathic pulmonary fibrosis, acute fulminant viral or bacterial infections, pneumonia, genetically inherited diseases with TNF/TNFR1 as the causative pathologic mediator, periodic fever syndrome, or cancer. In particular, constructs provided herein, such as, but not limited to, the TNFR1 antagonist constructs, can be used in uses, methods of treatment, and compositions for the treatment of rheumatoid arthritis.

[0173] Among the constructs, constituent chains, and other variants provided herein are the following. Provided are constructs that are tumor necrosis factor receptor 1 (TNFR1) antagonist constructs of formula 1:

(TNFR1 inhibitor)ₙ-linkerₚ-(activity modifier)_{q}, wherein:
[0174] each of n and q is an integer, n is 1 or 2, and q is 1;
[0175] p is 0, 1, 2 or 3;
[0176] a TNFR1 inhibitor is a molecule that binds TNFR1 to inhibit (antagonize) TNFR1;
[0177] an activity modifier is a moiety that modulates or alters the activity or the pharmacological property of the construct compared to the construct in the absence of the activity modifier;
[0178] a linker increases flexibility of the construct, and/or moderates or reduces steric effects of the construct or its interaction with a receptor, and/or increases solubility of the construct in aqueous medium;
[0179] the construct is a fusion protein that comprises a TNFR1 inhibitor that comprises a domain antibody (dAb);
[0180] the dAb comprises a dAb selected from those with a sequence set forth in any of SEQ ID NOs: 54-672, wherein the resulting construct, when bivalent where n is 2, does not have TNRF1 agonist activity;
[0181] when n is 2 the construct is bivalent and the domain antibody (dAb) is selected so that the construct has antagonist activity, but does not have agonist activity;
[0182] the activity modifier is a modified Fc that has one or more of
   [0183] a) mutations to increase serum half-life;
   [0184] mutations the Fc for the purpose of silencing the antibody effector function; and, when n=1 and q=2, the fc has a modification(s) to introduce knobs-into-holes;
[0185] b) a modification(s) to increase or enhance neonatal Fc receptor (FcRn) recycling; and
[0186] c) a modification(s) to reduce or eliminate immune effector functions.

[0187] Included are constructs in which the TNFR1 inhibitor comprises a domain antibody (dAb), or antigen-binding portion thereof or comprises the sequence of amino acids set forth in any of SEQ ID NOs: 54-672, or a sequence having at least 95% sequence identity thereto that retains TNFR1 inhibitor activity; and the dAb binds to the same epitope as the dAb of SEQ ID NO:59, and/or is one that, when n is 2 does not have TNFR1 agonist activity.

[0188] Included are those in which the dAb is one that binds to the same epitope on TNRF1 as the dAb of SEQ ID NO:59 binds. These include the dAbs whose sequence are set forth set forth in any of SEQ ID NOs: 55-84, 86-88, 450, and 495-498, which bind to the same epitope as dAb of SEQ ID NO:59. Also included are those in which the dAb portion comprises CDRs that have at least 95% sequence identity to HCDR1, HCDR2, and HCDR3 (SEQ ID NOs: 1510-1512, respectively) of DOM1h-131-511 (SEQ ID NO: 60), which binds domain 3 of the TNFR1 extracellular domain (ECD). FIG. 18 shows the complementary-determining regions (CDRs) for the dAb DOM1 h-311-511 and its variant 206.

[0189] As shown herein, the dAb, designated EN1206 (DOM1 h-131-206; SEQ ID NO: 59), binds to the domain 3 of the TNFR1 extracellular domain (ECD). As assayed herein it binds with an affinity of about 300-500 pM as measured by SPR.

[0190] The Fc portions of the constructs are modified to increase half-life and to reduce or eliminate immune effector functions, such as, one or more of complement-dependent cytotoxicity (CDC), antibody-dependent cell-mediated cytotoxicity (ADCC) and antibody-dependent cell-mediated phagocytosis (ADCP).

[0191] The constructs optionally include linkers between components. Linkers include, but are not limited to, chemical linkers, polypeptide linkers, and combinations thereof.

[0192] Provided are polypeptide chain selected from:
[0193] a) SEQ ID NO:1488, which is an Fc only comprising T366S,L368A,Y407V the hole, M252Y, S254T, T256E for increased half-life, 234A,L235A,P329G for minimizing, eliminating, or reducing Fc effector function, and includes a leader sequence, MGWSCIILFLVATATGVHS (SEQ ID NO:1509), that is cleaved off in a cell in which is the polypeptide is expressed and comprises the sequence:

MGWSCIILFLVATATGVHSDKTHTCPPCPAPEAAGGPSVFLFPPKPKDTL
YITREPEVTCVVVDVSHEDPEVKFNWYVDGVEVHNAKTKPREEQYNSTYR
VVSVLTVLHQDWLNGKEYKCKVSNKALGAPIEKTISKAKGQPREPQVYTL
PPSRDELTKNQVSLSCAVKGFYPSDIAVEWESNGQPENNYKTTPPVLDSD
GSFFLVSKLTVDKSRWQQGNVFSCSVMHEALHNHYTQKSLSLSPGK;

[0194] b) SEQ ID NO:1489, which comprises a dAb and Fc, where the Fc comprises the modifications T366W to form a knob, M252Y, S254T, T256E for increased half-life, and L234A,L235A,P329G for minimizing, reducing, or eliminating Fc effector function, and the chain includes a leader sequence, MGWSCIILFLVATATGVHS (SEQ ID NO:1509), that is cleaved off in a cell in which is the polypeptide is expressed:

MGWSCIILFLVATATGVHSEVQLLESGGGLVQPGGSLRLSCAASGFTFAH
ETMVWVRQAPGKGLEWVSHIPPDGQDPFYADSVKGRFTISRDNSKNTLYL
QMNSLRAEDTAVYHCALLPKRGPWFDYWGQGTLVTVSSDKTHTCPPCPAP
EAAGGPSVFLFPPKPKDTLYITREPEVTCVVVDVSHEDPEVKFNWYVDGV
EVHNAKTKPREEQYNSTYRVVSVLTVLHQDWLNGKEYKCKVSNKALGAPI
EKTISKAKGQPREPQVYTLPPSRDELTKNQVSLWCLVKGFYPSDIAVEWE
SNGQPENNYKTTPPVLDSDGSFFLYSKLTVDKSRWQQGNVFSCSVMHEAL
HNHYTQKSLSLSPGK;

[0195] c) SEQ ID NO:1505, which is an Fe with T366S,L368A,Y407V to form a hole, M252Y, S254T, T256E for increased half-life, L234A,L235A,P329G for minimizing, reducing, or eliminating Fc effector function, and comprises the sequence:

DKTHTCPPCPAPEAAGGPSVFLFPPKPKDTLYITREPEVTCVVVDVSHED
PEVKFNWYVDGVEVHNAKTKPREEQYNSTYRVVSVLTVLHQDWLNGKEYK
CKVSNKALGAPIEKTISKAKGQPREPQVYTLPPSRDELTKNQVSLSCAVK
GFYPSDIAVEWESNGQPENNYKTTPPVLDSDGSFFLVSKLTVDKSRWQQG
NVFSCSVMHEALHNHYTQKSLSLSPGK;

and
[0196] d) SEQ ID NO:1506, which comprises a dAb and Fc, where the Fc comprises T366W to form a knob, M252Y, S254T, T256E for increased half-life, and L234A, L235A, P329G for minimizing, reducing, or eliminating Fc effector function, and comprises the sequence:

EVQLLESGGGLVQPGGSLRLSCAASGFTFAHETMVWVRQAPGKGLEWVSH
IPPDGQDPFYADSVKGRFTISRDNSKNTLYLQMNSLRAEDTAVYHCALLP
KRGPWFDYWGQGTLVTVSSDKTHTCPPCPAPEAAGGPSVFLFPPKPKDTL
YITREPEVTCVVVDVSHEDPEVKFNWYVDGVEVHNAKTKPREEQYNSTYR
VVSVLTVLHQDWLNGKEYKCKVSNKALGAPIEKTISKAKGQPREPQVYTL
PPSRDELTKNQVSLWCLVKGFYPSDIAVEWESNGQPENNYKTTPPVLDSD
GSFFLYSKLTVDKSRWQQGNVFSCSVMHEALHNHYTQKSLSLSPGK.

[0197] Exemplary chains for forming the monovalent construct comprising two chains, where one chain comprises EN1206 monovalent and the Fc with hole, and the other chain comprises EN1206 and the Fc with knob, include those where: each chain comprises the leader sequence MGWSCIILFLVATATGVHS that is cleaved when expressed in a cell and is not present in the resulting construct; and each chain, when expressed, comprises the leader sequence and comprises the sequences:
[0198] a) a first chain that is an Fc with modified residues T366S,L368A,Y407V to form a hole, M252Y, S254T, T256E for increasing half-life and L234A, L235A, P329G for minimizing, reducing, or eliminating Fc effector function and having the sequence (SEQ ID NO:1488):

MGWSCIILFLVATATGVHSDKTHTCPPCPAPEAAGGPSVFLFPPKPKDTL
YITREPEVTCVVVDVSHEDPEVKFNWYVDGVEVHNAKTKPREEQYNSTYR
VVSVLTVLHQDWLNGKEYKCKVSNKALGAPIEKTISKAKGQPREPQVYTL
PPSRDELTKNQVSLSCAVKGFYPSDIAVEWESNGQPENNYKTTPPVLDSD
GSFFLVSKLTVDKSRWQQGNVFSCSVMHEALHNHYTQKSLSLSPGK,

wherein MGWSCIILFLVATATGVHS is the leader sequence; and
[0199] b) the second chain that comprises the dAb and a modified Fc with T366W to form a knob, M252Y, S254T, T256E for increasing half-life, and L234A, L235A, P329G minimizing, reducing, or eliminating Fc effector function and having the sequence (SEQ ID NO:1489):

MGWSCIILFLVATATGVHSEVQLLESGGGLVQPGGSLRLSCAASGFTFAH
ETMVWVRQAPGKGLEWVSHIPPDGQDPFYADSVKGRFTISRDNSKNTLYL
QMNSLRAEDTAVYHCALLPKRGPWFDYWGQGTLVTVSSDKTHTCPPCPAP
EAAGGPSVFLFPPKPKDTLYITREPEVTCVVVDVSHEDPEVKFNWYVDGV
EVHNAKTKPREEQYNSTYRVVSVLTVLHQDWLNGKEYKCKVSNKALGAPI
EKTISKAKGQPREPQVYTLPPSRDELTKNQVSLWCLVKGFYPSDIAVEWE
SNGQPENNYKTTPPVLDSDGSFFLYSKLTVDKSRWQQGNVFSCSVMHEAL
HNHYTQKSLSLSPGK.

[0200] wherein MGWSCIILFLVATATGVHS (SEQ ID NO:1509) is a leader sequence present when the chain is expressed but is not present in the two-chain monovalent construct.

[0201] Other chains, such as those for bivalent constructs with two identical chains include those that have comprise the sequence

(SEQ ID NO: 1507)
EVQLLESGGGLVQPGGSLRLSCAASGFTFAHETMVWVRQAPGKGLEWVSH
IPPDGQDPFYADSVKGRFTISRDNSKNTLYLQMNSLRAEDTAVYHCALLP
KRGPWFDYWGQGTLVTVSSDKTHTCPPCPAPEAAGGPSVFLFPPKPKDTL
YITREPEVTCVVVDVSHEDPEVKFNWYVDGVEVHNAKTKPREEQYNSTYR
VVSVLTVLHQDWLNGKEYKCKVSNKALGAPIEKTISKAKGQPREPQVYTL
PPSRDELTKNQVSLTCLVKGFYPSDIAVEWESNGQPENNYKTTPPVLDSD
GSFFLYSKLTVDKSRWQQGNVFSCSVMHEALHNHYTQKSLSLSPGK.

[0202] Constructs comprising two chains, include those in which:
[0203] a) one chain comprises the polypeptide (SEQ ID NO:1505)

DKTHTCPPCPAPEAAGGPSVFLFPPKPKDTLYITREPEVTCVVVDVSHED
PEVKFNWYVDGVEVHNAKTKPREEQYNSTYRVVSVLTVLHQDWLNGKEYK
CKVSNKALGAPIEKTISKAKGQPREPQVYTLPPSRDELTKNQVSLSCAVK
GFYPSDIAVEWESNGQPENNYKTTPPVLDSDGSFFLVSKLTVDKSRWQQG
NVFSCSVMHEALHNHYTQKSLSLSPGK,
with modified residues T366S, L368A, Y407V to form
a hole, M252Y, S254T, T256E for increasing half-
life and L234A, L235A, P329G that reduce or
eliminate Fc effector function;

and
[0204] b) the second chain comprises the polypeptide (SEQ ID NO:1506)

EVQLLESGGGLVQPGGSLRLSCAASGFTFAHETMVWVRQAPGKGLE
WVSHIPPDGQDPFYADSVKGRFTISRDNSKNTLYLQMNSLRAEDTA
VYHCALLPKRGPWFDYWGQGTLVTVSSDKTHTCPPCPAPEAAGGPS
VFLFPPKPKDTLYITREPEVTCVVVDVSHEDPEVKFNWYVDGVEVH
NAKTKPREEQYNSTYRVVSVLTVLHQDWLNGKEYKCKVSNKALGAP
IEKTISKAKGQPREPQVYTLPPSRDELTKNQVSLWCLVKGFYPSDI
AVEWESNGQPENNYKTTPPVLDSDGSFFLYSKLTVDKSRWQQGNVF
SCSVMHEALHNHYTQKSLSLSPGK,

[0205] which comprises a dAb linked to the Fe with the hole and modified to have increased half-life and reduced or eliminated Fc effector function as in the first chain.

[0206] Exemplary constructs are those designated EN1206-MV or EN1206-BV that comprises the dAb of SEQ ID NO:59 and the modified Fc that comprises M252Y, S254T, T256E for increasing half-life and L234A,L235A,P329G for minimizing, reducing, or eliminating Fc effector function, or a construct that comprises the dAb of any of SEQ ID NOs: 55-58, 60-84, 86-88, 450, or 495-498, in place of the dAb of SEQ ID NO:59. The construct designated EN1206-BV two chains where each chain comprises the sequence (SEQ ID NO:1507):

EVQLLESGGGLVQPGGSLRLSCAASGFTFAHETMVWVRQAPGKGLE
WVSHIPPDGQDPFYADSVKGRFTISRDNSKNTLYLQMNSLRAEDTA
VYHCALLPKRGPWFDYWGQGTLVTVSSDKTHTCPPCPAPEAAGGPS
VFLFPPKPKDTLYITREPEVTCVVVDVSHEDPEVKFNWYVDGVEVH
NAKTKPREEQYNSTYRVVSVLTVLHQDWLNGKEYKCKVSNKALGAP
IEKTISKAKGQPREPQVYTLPPSRDELTKNQVSLTCLVKGFYPSDI
AVEWESNGQPENNYKTTPPVLDSDGSFFLYSKLTVDKSRWQQGNVF
SCSVMHEALHNHYTQKSLSLSPGK.

[0207] In contrast provided is a bivalent construct designated EN1208-BV, wherein each chain comprises the sequence:

(SEQ ID NO: 1508)
EVQLLESGGGLVQPGGSLRLSCAASGFTFDKYSMGWVRQAPGKGLE
WVSQISDTADRTYYAHAVKGRFTISRDNSKNTLYLQMNSLRAEDTA
VYYCAIYTGRWVPFEYWGQGTLVTVSSDKTHTCPPCPAPEAAGGPS
VFLFPPKPKDTLYITREPEVTCVVVDVSHEDPEVKFNWYVDGVEVH
NAKTKPREEQYNSTYRVVSVLTVLHQDWLNGKEYKCKVSNKALGAP
IEKTISKAKGQPREPQVYTLPPSRDELTKNQVSLTCLVKGFYPSDI
AVEWESNGQPENNYKTTPPVLDSDGSFFLYSKLTVDKSRWQQGNVF
SCSVMHEALHNHYTQKSLSLSPGK.

[0208] Provided is a construct that is a bivalent construct comprising two chains, comprising a dAb and a modified Fc, wherein the leader sequence MGWSCIILFLVATATGVHS is cleaved upon expression in a cell; and is not present in the resulting construct:

(SEQ ID NO: 1490)
MGWSCIILFLVATATGVHSEVQLLESGGGLVQPGGSLRLSCAASGF
TFAHETMVWVRQAPGKGLEWVSHIPPDGQDPFYADSVKGRFTISRD
NSKNTLYLQMNSLRAEDTAVYHCALLPKRGPWFDYWGQGTLVTVSS
DKTHTCPPCPAPEAAGGPSVFLFPPKPKDTLYITREPEVTCVVVDV
SHEDPEVKFNWYVDGVEVHNAKTKPREEQYNSTYRVVSVLTVLHQD
WLNGKEYKCKVSNKALGAPIEKTISKAKGQPREPQVYTLPPSRDEL
TKNQVSLTCLVKGFYPSDIAVEWESNGQPENNYKTTPPVLDSDGSF
FLYSKLTVDKSRWQQGNVFSCSVMHEALHNHYTQKSLSLSPGK

[0209] The constructs herein include those that comprise a dAb, an optional linker, and a modified Fe, wherein the dAb is selected from

a) DOM1h-576-208 SEQ ID NO: 54:
EVQLLESGGGLVQPGGSLRLSCAASGFTFDKYSMGWVRQAPGKGLE
WVSQISDTADRTYYAHAVKGRFTISRDNSKNTLYLQMNSLRAEDTA
VYYCAIYTGRWVPFEYWGQGTLVTVSS;
or
b) DOM1h-131-206 SEQ ID NO: 59:
EVQLLESGGGLVQPGGSLRLSCAASGFTFAHETMVWVRQAPGKGLE
WVSHIPPDGQDPFYADSVKGRFTISRDNSKNTLYLQMNSLRAEDTA
VYHCALLPKRGPWFDYWGQGTLVTVSS.

[0210] Those that comprise SEQ ID NO:59 have TNFR1 antagonist activity, but do not exhibit agonist activity.

[0211] Provided are constructs that comprise any of the chains provided herein. Thes include those in which the activity modifier is a modified Fc that has one or more of, generally at least b) and c):
[0212] a) a modification(s) to introduce knobs-into-holes;
[0213] b) a modification(s) to increase or enhance neonatal Fc receptor (FcRn) recycling; and
[0214] c) a modification(s) to reduce or eliminate immune effector functions, selected from among one or more of complement-dependent cytotoxicity (CDC), antibody-dependent cell-mediated cytotoxicity (ADCC) and antibody-dependent cell-mediated phagocytosis (ADCP). For example, the Fc is modified to have reduced or no ADCC activity and/or reduced or no CDC activity.

[0215] Also provided are constructs in which the TNFR1 inhibitor inhibits a TNFR1 activity, but does not antagonize tumor necrosis factor receptor 2 (TNFR2) activity. TNFR1 inhibition can include inhibition of TNFR1 signaling and/or ligand binding to TNFR1 or other such activities.

[0216] Also provided herein are constructs that are TNFR1 antagonist constructs that comprise a TNFR1 inhibitor that specifically targets and inhibits TNFR1, but that does not antagonize TNFR2. The constructs can prevent transient activation of TNFR1 via receptor clustering.

[0217] Among the constructs are those that comprise a linker between the dAb and Fc portions. Exemplary linkers are selected from among:
[0218] a) a linker that comprises all or a portion of the hinge sequence of trastuzumab, SCDKTH (corresponding to residues 222-227 of SEQ ID NO:26) or up to the full sequence of the hinge region of trastuzumab, that contains or has the sequence EPKSCDKTHTCPPCP (corresponding to residues 219-233 of SEQ ID NO:26), or at least 5, 6, 7, 8, 9, 10, or 11 contiguous residues thereof, or residues ESKYGPPCPPCP, set forth as residues 212-223 of SEQ ID NO:29, or a sequence having at least 98% or 99% sequence identity thereto that is a linker;
[0219] b) a linker that is or comprises a glycine-serine (GS) linker;
[0220] c) a GS linker selected from among (GlySer)ₙ, where n=1-10; (GlySer₂); (Gly₄Ser)ₙ, where n=1-10; (Gly₃Ser)ₙ, where n=1-5; (SerGly₄)ₙ, where n=1-5; (GlySerSerGly)ₙ, where n=1-5; GSGGSSGG; GSSSGSGSGSSG; GSSSGSGSGSSGG; GGSSGG; GGSSGGSGGSSSG; GSSSGSGSGGSSSGSGSG; GGSSGGSSGGGSSGGSSG; and GSSSGS;
[0221] d) a linker that comprises a GS linker and all or a portion of the hinge sequence of trastuzumab, corresponding to residues EPKSCDKTHTCPPCP, set forth as residues 219-233 of SEQ ID NO:26;
[0222] e) a linker that comprises a GS linker and comprises the sequence SCDKTH, corresponding to residues 217-222 of SEQ ID NO:31; and
[0223] f) a linker that comprises a GS linker and all or a portion of the hinge sequence of nivolumab, corresponding to residues 212-223 of SEQ ID NO:29.

[0224] Linker can be selected from among:
[0225] i) a GS linker selected from among (GlySer)ₙ, where n=1-10; (GlySer₂); (Gly₄Ser)ₙ, where n=1-10; (Gly₃Ser)ₙ, where n=1-5; (SerGly₄)ₙ, where n=1-5; (GlySerSerGly)ₙ, where n=1-5; GSGGSSGG; GSSSGSGSGSSG; GSSSGSGSGSSGG; GGSSGG; GGSSGGSGGSSSG; GSSSGSGSGGSSSGSGSG; GGSSGGSSGGGSSGGSSG; and GSSSGS;
[0226] ii) a second linker selected from among all or a portion of the hinge sequence of trastuzumab and all or a portion of the hinge sequence of nivolumab; and
[0227] iii) a half-life extending moiety that is an IgG Fc.

[0228] The constructs can comprise a dAb set forth in any of SEQ ID NOs:54-83, 503-672, 1478 and 1479 or these include the dAbs whose sequence are set forth in any of SEQ ID NOs: 55-84, 86-88, 450, and 495-498, which bind to the same epitope as dAb of SEQ ID NO:59, and variants thereof having at least 95%, 96%, 97%, 98%, or 99% sequence identity thereto, whereby the construct has TNFR1 antagonist activity, and does not have agonist activity.

[0229] The constructs comprise modified Fc's where the unmodified Fc is an IgG1 or IgG4 Fc; and where:
[0230] the IgG1 Fc is selected from the IgG1 Fc of human IgG1, set forth in SEQ ID NO:10, or the IgG1 Fc of trastuzumab, set forth in SEQ ID NO:27;
[0231] the IgG4 Fc is selected from the IgG4 Fc of human IgG4, set forth in SEQ ID NO:16, or the IgG4 Fc of nivolumab, set forth in SEQ ID NO:30; and
[0232] optionally, the Fc includes one or more modifications to introduce knobs-into-holes, and/or increase or enhance neonatal Fc receptor (FcRn) recycling, and/or reduce or eliminate immune effector functions.

[0233] The modified Fc can be is an IgG Fc that further comprises modification(s) to increase or enhance neonatal Fc receptor (FcRn) recycling. Modifications in the Fc portions include, for example Fc portions selected from among:
[0234] a) an Fc that comprises knobs-into-holes modifications, wherein:
   [0235] the knob mutation is selected from among one or more of S354C, T366Y, T366W, and T394W by EU numbering; and
   [0236] the hole mutation is selected from among one or more of Y349C, T366S, L368A, F405A, Y407T, Y407A, and Y407V by EU numbering;
[0237] b) an Fc that comprises modifications to increase or enhance FcRn recycling that is/are selected from among one or more of: T250Q, T250R, M252F, M252W, M252Y, S254T, T256D, T256E, T256Q, V259I, V308F, E380A, M428L, H433K, N434F, N434A, N434W, N434S, N434Y, Y436H, M252Y/T256Q, M252F/T256D, M252Y/S254T/T256E, H433K/N434F/Y436H, N434F/Y436H, T250Q/M428L, T250R/M428L, M428L/N434S, V259I/V308F, V259I/V308F/M428L, E294del/T307P/N434Y, and T256N/A378V/S383N/N434Y, by EU numbering;
[0238] c) an Fc that comprises modifications to immune effector functions that are selected from among one or more of complement-dependent cytotoxicity (CDC), antibody-dependent cell-mediated cytotoxicity (ADCC) and antibody-dependent cell-mediated phagocytosis (ADCP);
[0239] d) a construct that comprises modification(s) in the Fe to reduce or eliminate immune effector functions, wherein the Fc and modifications are selected from among one or more of:
[0240] in IgG1: L235E, L234A/L235A, L234E/L235F/P331S, L234F/L235E/P331S, L234A/L235A/P329G, L234A/L235A/G237A/P238S/H268A/A330S/P331S, G236R/L328R, G237A, E318A, D265A, E233P, N297A, N297Q, N297D, N297G, N297G/D265A, A330L, D270A, P329A, P331A, K322A, V264A, and F241A, by EU numbering; and
[0241] in IgG4: L235E, F234A/L235A, S228P/L235E, and S228P/F234A/L235A, by EU numbering;
[0242] e) an Fc that is an IgG Fc that comprises one or more of the following modifications:
   [0243] i) a modification(s) to introduce knobs-into-holes, wherein:
   [0244] the knob mutation is selected from among one or more of S354C, T366Y, T366W, and T394W by EU numbering; and
   [0245] the hole mutation is selected from among one or more of Y349C, T366S, L368A, F405A, Y407T, Y407A, and Y407V by EU numbering;
   [0246] ii) a modification(s) to increase or enhance neonatal Fc receptor (FcRn) recycling, wherein the modification is selected from among one or more of:
   [0247] T250Q, T250R, M252F, M252W, M252Y, S254T, T256D, T256E, T256Q, V259I, V308F, E380A, M428L, H433K, N434F, N434A, N434W, N434S, N434Y, Y436H, M252Y/T256Q, M252F/T256D, M252Y/S254T/T256E, H433K/N434F/Y436H, N434F/Y436H, T250Q/M428L, T250R/M428L, M428L/N434S, V259I/V308F, V259I/V308F/M428L, E294del/T307P/N434Y, and T256N/A378V/S383N/N434Y, by EU numbering; and
   [0248] iii) a modification(s) to increase or enhance immune effector functions, wherein:
   [0249] the immune effector functions are selected from among one or more of CDC, ADCC and ADCP; and
   [0250] the modification(s) to increase or enhance immune effector functions is selected from among one or more of:
      [0251] in IgG1: S239D; 1332E; S239D/I332E; S239D/A330L/I332E; S298A/E333A/K334A; F243L/R292P/Y300L/V305I/P396L; L235V/F243L/R292P/Y300L/P396L; F243L/R292P/Y300L; L234Y/G236W/S298A in the first heavy chain and S239D/A330L/I332E in the second heavy chain; L234Y/L235Q/G236W/S239M/H268D/D270E/S298A in the first heavy chain and D270E/K326D/A330M/K334E in the second heavy chain; A327Q/P329A; D265A/S267A/H268A/D270A/K326A/S337A; T256A/K290A/S298A/E333A/K334A; G236A; G236A/1332E; G236A/S239D/I332E; G236A/S239D/A330L/I332E; introduction of a biantennary glycan at residue N297; introduction of an afucosylated glycan at residue N297; K326W; K326A; E333A; K326A/E333A; K326W/E333 S; K326M/E333 S; K222W/T223W; K222W/T223W/H224W; D221W/K222W; C220D/D221C; C220D/D221C/K222W/T223W; H268F/S324T; S267E; H268F; S324T; S267E/H268F/S324T; G236A/I332E/S267E/H268F/S324T; E345R; and E345R/E430G/S440Y, by EU numbering; and
[0252] f) an Fc that is modified to increase binding to the inhibitory Fcγ receptor (FcγR) FcγRIIb.
[0253] g) combinations of a)-f). Generally, in the constructs herein, the Fc's include modifications to increase half-life and at least one or two additional modification.

[0254] Modifications that increase binding to FcγRIIb are selected from among one or more of S267E, N297A, L328F, L351S, T366R, L368H, P395K, S267E/L328F and L351S/T366R/L368H/P395K, by EU numbering.

[0255] In particular examples, the constructs comprises the dAb of SEQ ID NO:59 or a variant thereof having at least 95% sequence identity thereto and binding to the same epitope as SEQ ID NO:59 linked directly or indirectly via a linker to a modified Fc, wherein the Fc is modified to have increased half-life. Exemplary thereof are those designated EN1206-BV and EN1206-MV, wherein the EN1206-MV construct comprises Fc's with knobs into holes. Constructs comprising polypeptides of SEQ ID NOs: 1488-1490 and/or SEQ ID NOs:1505-1507 and variants thereof, with 95% or greater sequence identity, that bind TNRF1 and have anti-TNFR1 antagonist activity and retain the half-life of constructs. Variants generally have at least 95% sequence identity with the recited sequence. Exemplary constructs include a monovalent construct, comprising the dAb-knob chain (SEQ ID NO: 1506) linked to the Fe hole chain (SEQ ID NO:1505), and variants thereof that bind TNRF1 and have anti-TNFR1 antagonist activity and retain the half-life of constructs, wherein the knob and hole Fc portions form an Fc multimer that displays the dAb portion. Also exemplary is a bivalent construct comprising the polypeptide of SEQ ID NO: 1507 and variants thereof that bind TNRF1 and have anti-TNFR1 antagonist activity and retain the half-life of constructs.

[0256] Provided are pharmaceutical compositions containing one or a mixture of any of the constructs provided herein in a pharmaceutically acceptable vehicle. The constructs and pharmaceutical compositions are for use for treating a disease, disorder, or condition that is treated by inhibiting TNFR1 or in methods of treating such diseases, disorders, and conditions by administering the composition or construct. Diseases, disorders, and conditions include, for example, a chronic inflammatory, autoimmune, neurodegenerative, demyelinating, or respiratory disease or disorder, or a disease, condition or disorder characterized by overexpression of TNF or deregulated TNFR1 signaling in its etiology. Diseases, disorders, and conditions include, but are not limited to: rheumatoid arthritis (RA), psoriasis, psoriatic arthritis, juvenile idiopathic arthritis (JIA), spondylarthritis, ankylosing spondylitis, Crohn's disease, ulcerative colitis, inflammatory bowel disease (IBD), uveitis, fibrotic diseases, endometriosis, lupus, multiple sclerosis (MS), congestive heart failure, cardiovascular disease, myocardial infarction (MI), atherosclerosis, metabolic diseases, cytokine release syndrome, septic shock, sepsis, acute respiratory distress syndrome (ARDS), severe acute respiratory syndrome (SARS), SARS-CoV-2, influenza, acute and chronic neurodegenerative diseases, demyelinating diseases and disorders, stroke, Alzheimer's disease, Parkinson's disease, Behget's disease, Dupuytren's disease, Tumor Necrosis Factor Receptor-Associated Periodic Syndrome (TRAPS), pancreatitis, type I diabetes, chronic obstructive pulmonary disease (COPD), chronic bronchitis, emphysema, graft rejection, graft versus host disease (GvHD), lung inflammation, pulmonary diseases and conditions, asthma, cystic fibrosis, idiopathic pulmonary fibrosis, acute fulminant viral or bacterial infections, pneumonia, genetically inherited diseases with TNF/TNFR1 as the causative pathologic mediator, periodic fever syndrome, or cancer.

[0257] Methods for identifying a construct or TNFR1 inhibitor that is a TNFR1 antagonist, and that is not a TNFR1 agonist are provided. Exemplary of such methods is a methods comprising:
[0258] a) identifying a construct that has high affinity binding, such as, for example, nanomolar amount (10⁻⁹ M) or less. specific for TNFR1;
[0259] b) screening the constructs of a) using an assay that identifies constructs that exhibit inhibit TNF-stimulated expression of NF-κB and/or expression of inflammatory cytokines; and
[0260] c) from among the constructs identified in b), selecting those that lack agonist activity. For example, in such methods, the assays in a) and c) can be THP1 cell assays.

[0261] Also provided are constructs that are a tumor necrosis factor receptor 1 (TNFR1) antagonist construct of formula 1:

(TNFR1 inhibitor)ₙ-linkerₚ-(activity modifier)_{q}, wherein:
[0262] each of n and q is an integer, n is 1 or 2, and q is 1;
[0263] p is 0, 1, 2 or 3;
[0264] a TNFR1 inhibitor is a molecule that binds TNFR1 to inhibit (antagonize) TNFR1;
[0265] the TNFR1 inhibitor binds to the same epitope as the dAb of SEQ ID NO:59, whereby a construct that is bivalent, where n is 2, does not have agonist activity;
[0266] an activity modifier is a moiety that modulates or alters the activity or the pharmacological property of the construct compared to the construct in the absence of the activity modifier and is a modified Fc or human serum albumin (HSA), where the Fc is modified to have increased half-life and reduced immune effector activity compared to the unmodified Fc; and
[0267] the linker increases flexibility of the construct, and/or moderates or reduces steric effects of the construct or its interaction with a receptor, and/or increases solubility in aqueous media of the construct.

[0268] Also provided are constructs that are tumor necrosis factor receptor 1 (TNFR1) antagonist constructs of formula 1:

(TNFR1 inhibitor)ₙ-linkerₚ-(activity modifier)_{q}, wherein:
[0269] each of n and q is an integer, n is 1 or 2, and q is 1;
[0270] p is 0, 1, 2 or 3;
[0271] a TNFR1 inhibitor is a molecule that binds TNFR1 to inhibit (antagonize) TNFR1;
[0272] an activity modifier is a moiety that modulates or alters the activity or the pharmacological property of the construct compared to the construct in the absence of the activity modifier;
[0273] a linker increases flexibility of the construct, and/or moderates or reduces steric effects of the construct or its interaction with a receptor, and/or increases solubility of the construct in aqueous medium; the construct is a fusion protein that comprises a TNFR1 inhibitor, wherein the resulting construct, when bivalent, where n is 2, does not have TNRF1 agonist activity;
[0274] when n is 2 whereby the construct is bivalent, the TNFR1 inhibitor is selected so that the construct has antagonist activity, but does not have agonist activity;
[0275] the activity modifier is a modified Fc that has one or more of mutations to increase serum half-life and comprises modifications for the purpose of silencing the antibody effector function; and, when n=1 and q=2, the Fc has a modification(s) to introduce knobs-into-holes.

[0276] The Fc portions of the constructs include those that have one or more modification(s) to increase or enhance neonatal Fc receptor (FcRn) recycling; and modification(s) to reduce or eliminate immune effector functions. TNFR1 inhibitors include, but are not limited to, a TNFR1 inhibitor that comprises an scFv, or a Fab, or that is a nanobody, or a dominant-negative TNF or a TNF mutein, or that is a dAb. The TNFR1 inhibitor can be one that is a selective antagonist comprises an antigen-binding fragment that selectively binds and inhibits TNFR1 signaling but not TNFR2 signaling.

[0277] Also provided are construct that further comprise a TNFR2 agonist, such as construct that comprises the formula:

(TNFR1 inhibitor)₁-(activity modifier)ᵣ₁(Linker(L))ₚ-(activity modifier)ᵣ₂-(TNFR2 agonist)_{q}, or

(TNFR1 inhibitor)₁-(activity modifier)ᵣ₁(Linker(L))ₚ-(activity modifier)ᵣ₂-(Treg expander)_{q},
[0278] where: n=lor 2, or 3, p=1, 2, or 3, q=0, 1 or 2, and each of r1 and r2 is independently 0, 1, or 2; and the components can be in the order specified or any other order as long as the construct interacts with TNFR1 and TNFR2 to antagonize TNFR1 and agonize TNFR2, or has Treg expander activity, but does not have TNFR1 agonist activity.

[0279] Nucleic acid molecules encoding any of the constructs and constituent chains are provided. Also provided are vectors and cells containing the vectors and nucleic acids. Methods for producing the constructs by expressing the chains and constructs in the cells and isolating the resulting chains and constructs are provided. The chains can be produced separately, isolated, and combined into constructs. Alternatively, mixtures of the constructs can be co-expressed in the cells and the constructs of interest isolated, and, if needed, separated. Those of skill in the art are familiar with the variety of methods by which products, such as antibodies are produced.

[0280] The claims set forth in the application as filed and as filed in the priority application are incorporated by reference into this Summary.

### BRIEF DESCRIPTION OF THE DRAWINGS

[0281] FIG. 1 depicts a plasmid map of the pCBL-1 expression plasmid containing the CMV promoter where TE19080L is the inserted fragment.

[0282] FIG. 2 sets forth an exemplary bi-specific construct—with a linker (part of a hinge region) and activity modifier joining two ligands, such as TNFR1 inhibitor (TNFR1 antagonist) and a TNFR2 agonist.

[0283] FIGS. 3A-3D depict exemplary PEG-centered multi-specific constructs, which are for presenting/providing two or more moieties that interact with one or more targets, or with one target at a plurality of sites. FIG. 3A depicts an exemplary bivalent construct. One of the circles is, for example, a polypeptide agonist, antagonist or a binding protein, such as an antibody or antigen-binding fragment thereof, or an aptamer (nucleic acid or peptide). The other circle represents polysaccharides or receptor ligands or other moieties that interact with a target of interest. The bivalent nature provides for clustering of targets for receptor activation. In embodiments provided herein, the targets include TNFR1 and TNFR2; and as described throughout the disclosure herein, moieties include TNFR1 inhibitors, such as moieties that inhibit TNFR1 signaling, and TNFR2 agonists or other moieties that are Treg expanders.

[0284] FIG. 3B depicts a monovalent single ligand, such as CD3+, to prevent cytokine release syndrome, linked via the PEG moieties to the agonist, antagonist, or binding protein, which is bivalent for receptor clustering. Again, exemplary targets include TNFR1 and/or TNFR2. FIG. 3C depicts a heterobifunctional PEG for crosslinking two different cell targeting agents, or two agents, such as trastuzumab and pertuzumab or portions thereof, that bind to different sites on the same receptor. This construct can be used, for example, to cluster a checkpoint control receptor for either stimulation or inhibition of an immune response, or to crosslink two different receptors to achieve suppression of receptor activity (i.e., CD3 vs CD450, or to deliver two different ligands, such as a stimulatory and a co-stimulatory ligand, to two different receptors on the same cells. FIG. 3D depicts a homobifunctional PEG for clustering identical receptors on the same or different cells, depending upon chain length, or to trap circulating disease target, such as a soluble receptor or ligand, such as TNF. Additionally, in all of these embodiments additional PEG side chain(s), optionally linked to another reactive group or functional group, such as a serum half-life extending moiety, such as HSA, or an FcRn polypeptide, can be included in these constructs. The PEG moieties can be modified or replaced with moieties with similar properties for presentation of the binding moieties.

[0285] FIG. 4 depicts additional exemplary configurations and structures of PEG-centered constructs for displaying or providing binding moieties or reactive moieties, such as the TNFR1 inhibitors and/or the TNFR2 agonists as described herein.

[0286] FIG. 5 depicts additional exemplary configurations and structures of PEG-centered constructs for displaying or providing binding moieties or reactive moieties, such as the TNFR1 inhibitors and/or the TNFR2 agonists. X and Y can be ligands and reactive moieties.

[0287] FIG. 6 shows the effects of the exemplary construct designated Vhh-4 (see Example 4) on gene expression in THP1 cells that were stimulated with TNF-α. These effects were compared to the effects on gene expression by etanercept (Enbrel®) and adalimumab/Humira® for the ability to suppress TNF-induced gene expression of interleukin-6, IL-8 and TNF (three inflammatory cytokines). Controls (four bars on the left side of each panel) show the level of cytokine expression when cells are exposed to the inhibitors in the absence of added TNF. The four bars on the right side of each panel show the level of cytokine expression in the presence of TNF. The first bar on the right side of each panel shows relative TNF-induced gene expression of the respective cytokine (IL-6, IL-8, TNF) in the absence of inhibitor. The next bar, in each of the graphs, shows the relative level of cytokine expression in the presence of Vhh-4, the next bars show results in the in the presence of etanercept/Enbrel®, and adalimumab/Humira®. TNF-induced gene expression of IL-6, IL-8 and TNF was reduced about 10-fold in each case, indicating that Vhh-4 is at least as potent as etanercept/Enbrel® or adalimumab/Humira® (n=3; ±SEM; *p<0.05; **p<0.01; ***p<0.001).

[0288] FIGS. 7A and 7B show relative gene expression of TNF-induced inflammatory cytokine release in THP1 cells treated with TNF and different does and combinations of EN 1206, 206, 541(208), and 019. FIG. 7A shows the relative gene expression of CXCL8(IL8) in THP1 cells treated with one of EN-1206, 206, 541(208), or 019 each at 32, 16, 8, or 4 nM or treated with combinations of 206+541, 206+019, and 541+019 each at concentrations of 8 or 4 nM. The 206 peptide shows the greatest reduction in CXCL8(IL8) relative gene expression of all the tested constructs and combinations. FIG. 7B shows the relative gene expression of TNF in THP1 cells treated with one of EN-1206, 206, 541(208), or 019 each at 32, 16, 8, or 4 nM, or treated with combinations of 206+541, 206+019, and 541+019 each at concentrations of 8 or 4 nM. The 206 peptide alone shows the greatest reduction in TNF relative gene expression of all the tested constructs and combinations.

[0289] FIGS. 8A and 8B depict TNF inhibitor constructs. FIG. 8A shows the structure of constructs designated EN1000-206 (206), EN1206-MV (monovalent), EN1206-BV (bivalent), and EN1208-BV. EN-1000-206 (206), is a humanized nanobody binding to domain 4 of TNFR1. EN-1000-208 is a humanized nanobody binding to domain 3 of TNFR1. EN-1206-Fc-MV (EN1206-MV or EN1206-OA) is a one-armed antibody with the EN-1000-206 nanobody fused without a linker to the N-terminus a human Fc region of human IgG1a. EN-1206-Fc-BV (EN1206-BV or EN1206) is a bivalent antibody knob-in-hole construct with EN-1000-206 fused with the N-terminus of 2 IgG1a Fc subunits. EN-1208-Fc-BV (EN1208-BV or EN1208) is similar to EN-1206-Fc-BV but with EN-1000-208 fused with two subunits of IgG1a. The Knobs-into-holes mutation of EN1206-MV facilitates heterodimer pairing.

[0290] FIG. 8B depicts the constructs EN1206-MV, EN1206-BV, including the knob-in-holds, and EN1208-BV,

[0291] FIG. 9 is an illustrative depiction of the target binding assay performed to assess the binding of each of EN1206-MV, EN1206-BV, and EN1208-BV to the analytes hTNFR1 and hTNFR2 using a protein A chip. Also included are the binding curves from the human TNFR1 binding assay for EN1206-MV, EN1206-BV, and EN1208-BV.

[0292] FIG. 10 is an illustrative depiction of the target binding assay performed to assess the binding of EN1206-BV and EN1208-BV to the analytes hTNFR1 and hTNFR2 using a CM5 chip. Also included are the binding curves for TNFR1 to each of EN1206-BV and EN1208-BV.

[0293] FIGS. 11A and 11B show the binding curves and quantified (table), dose dependent binding of EN1206-mv and EN1208-bv to immobilized soluble human TNFR1. Octet RED96 was used to measure the binding affinity of EN1206mv and EN1208bv. FIG. 11A shows dose-depending binding of EN1206mv to immobilized TNFR1 on HIS1k chip detected within the concentration orange of 0.412 nM to 100 nM. FIG. 11B shows dose dependent binding of EN1208bv to the immobilized TNFR1 on SA chip detected within the concentration range of 3.7 nm to 300 nM.

[0294] FIGS. 12A and 12B depict ligand binding to TNFR1 that is blocked by EN1206-MV (EN1206-OA), EN1206-BV (EN1206), and EN1208-BV (EN1208).

[0295] FIG. 12A is a diagram depicting ELISA binding assay setup. FIG. 12B binding curves demonstrate that binding of TNFR1 to the immobilized TNF-α (left panel) or lymphotoxin (TNF-β) (right panel) can be blocked by EN1206-MV (circles), EN1206-BV (squares), or EN1208-BV (diamonds) in a dose-dependent manner. EN1206-BV is a potent TNFR1 antagonist.

[0296] FIGS. 13A-C show CXCL8(IL8) (FIG. 13A) and TNF-α (FIG. 13B) relative gene expression in THP1 cells treated with 0, 1, 3, or 10 nM of an anti-TNFR1 agent (206 VhH (the dAB), EN1206-MV, EN1206-BV, or EN1208-BV) followed by a 6-hour treatment of TNF-α (100 ng/mL). The RNA samples were collected, and qPCR analysis was performed to analyze gene expression using HPRT as an internal control (N=3, mean±SEM). FIG. 13C shows a comparison of EN-1000-206 Domain Antibody (206dAb) vs.EN-1206-Fc-MV (monovalent) and EN-1206-Fc-BV (bivalent) for Suppression of TNF-induced Expression of CXCL8(IL8) and TNF; the horizontal line (relative gene expression=1) indicates baseline expression vs. the HGPRT.

[0297] FIGS. 14A-E are sets of bar graphs that quantify the relative potency of CXCL8(IL8) and TNF inhibition by EN-1000-206dAb vs. EN-1206-Fc-MV, BV. The data shown are the background subtracted ratio of gene expression values from FIG. 13C wherein the potency of EN-1000-206dAb=1. FIG. 14A is the relative potency for EN-1206-Fc-MV suppression of TNF expression. FIG. 14B is the relative potency for EN-1206-Fc-BV suppression of TNF expression. FIG. 14C is the relative potency for EN-1206-Fc-MV suppression of CXCL8(IL8) expression. FIG. 14D is the relative potency for EN-1206-Fc-BV suppression of CXCL8 (IL8) expression. FIG. 14E is a table summarizing the quantified results of bar graphs in FIGS. 14A-D.

[0298] FIG. 15 is a graph that quantifies the percentage of cytokine expression, IL8(CXCL8) (left panel), TNF (right panel) following TNF-α treatment as a function of concentration of anti-TNFR1 agent administered (0.05, 0.1, 0.25, 0.5, 1, 3 or 10 nM of etanercept (Enbrel®) (triangles), or EN1206-BV (circles), or EN1206-MV (squares)). The graphs show the quantified results of the qPCR analysis of gene expression using HPRT as an internal control (N=3, mean±SEM).

[0299] FIG. 16 is a second graph that quantifies the percentage of cytokine expression, IL8(CXCL8) (left panel), TNF-α (right panel) following TNF-α treatment as a function of concentration of anti-TNFR1 agent administered (0.05, 0.1, 0.25, 0.5, 1, 3 or 10 nM of etanercept (Enbrel®) (light grey), or EN1206-BV (black), or EN1206-MV (grey)). The results demonstrate that monovalent and bivalent forms of EN-1206-Fc are more potent than etanercept in blocking TNF-induced cytokine release.

[0300] FIG. 17 depicts a diagram (right drawing) of the binding assay using the Octet Streptavidin (SA) biosensor to immobilize the TNFR1-His-avi tag protein to assess the binding of EN1208-BV (703291) and EN1206-MV (70269_1). The graph shows the results of the epitope binning assay wherein the Streptavidin (SA) biosensor chip was used to immobilize the TNFR1. This was followed by binding of the EN1208bv (the 1^{st} antibody) and EN1206mv (the 2^{nd} antibody), sequentially, to the immobilized TNFR1. Each generated a binding curve typical of non-overlapping epitopes confirming that EN1206/Fc-mv and EN1208/Fc-bv bind to the non-overlapping, separate epitopes.

[0301] FIG. 18 is a table, which illustrates the amino acid sequences of the dAbs that bind to human TNFR1 (from Enever et al., Stress selections on domain antibodies: ‘what doesn't kill you makes you stronger’. Protein Eng Des Sel., 28(3):59-66 (2015)). One of the clones studied, designated Dom1h-131-511(highlighted), is a VH dAb that binds to domain three of human TNFR1. As detailed in Enever et al., after stability optimization, top variants were selected and their mutations in CDRs and frameworks were compared. The variants derived from Dom1h-131-511 also included dAbs designated Dom1h-131-202, -203, -204, and -206 (highlighted). Compared to the parent clone Dom-131-511, the optimized variant Dom1h-131-206 (SEQ ID NO:59) showed better binding affinity to TNFR1 (Enever et al., Table II), more resistant to proteases (Enever et al., FIG. 2), improved melting temperature and EC50 (Enever et al., Table III).

[0302] FIG. 19 provides sequence alignment between and among Dom1h-131-206 (EN1206) and other dABs to select sequences (in black) that will bind the same epitope in TNFR1. It was found herein that constructs that comprise the -206 dAb, do not exhibit agonist activity. The EN1206 dAb is the VHH that binds to TNFR1 and that is the affinity and stability optimized clone derived from the parental clone DOM1 h-131-511; the underlined portions of sequence in DOM1 h-131-206 (SEQ ID NO:59) comprise the three heavy chain complementarity-determining regions (HCDR) that bind domain 3 of TNFR1 ECD (HCDR1: AHETMV; HCDR2: HIPPDGQDPFYADSVKG; HCDR3: LPKRGPWFDY). The optimization processes generated many other variants as well, see complete list of aligned sequences in FIG. 19. The VHH portion of EN1206 or DOM1 h-131-206 was selected from among other variants. Sequence alignment herein indicates there is only one AA difference between DOM1 h-131-511 CDRs (parental) and DOM1 h-131-206 CDRs (3%). Among the dAbs (SEQ ID NOs: 54-672, at least 36 (in black text) bind to the same epitope based on the combined AA similarity in the three CDRs of each sequence. Any dAbs with sequences having >~95% sequence identity to the CDRs will bind to the same epitope as the -206 dAb. These include the dAbs set forth in any of SEQ ID NOs: 55-84, 86-88, 450, 495-498 bind to the same epitope as EN 1206.

[0303] FIG. 20 is a diagram illustrating an assay to show that EN1206 suppresses in vivo TNF-induced cytokine expression.

[0304] FIG. 21 are the quantified results of an in vivo assay showing the EN-1206-Fc-MV suppresses in vivo LPS-induced IL-6 and CXCL1. The assay involves a 2 hour Predose with Infliximab, an anti-TNF antibody sold under the brand names Remicade® and Inflectra®) at 10 mg/kg, or EN-1206-Fc-MV at 3 mg/kg and 30 mg/kg; Time 0: 10 ug LPS; Time 5H: Serum Samples are collected and ELISA performed. The experimental results confirm the clinical observation that the product sold as Inflectra® leaves behind ~20% of non-responders. Specific downregulation of TNFR1 by EN-1206-Fc-MV gives a more complete response rate, likely due to TREGS with higher FOXP3 levels, see FIGS. 23A-F.

[0305] FIG. 22 is a diagram to illustrate the approach used to assess the role of regulatory T cells.

[0306] FIGS. 23A-23F show the scatter plots and bar graphs generated from a FACS analysis that demonstrate that EN-1206-Fc-MV and EN-1206-Fc-BV are superior to etanercept (Enbrel®; TNF Blocker) in preserving the human regulatory T cell population in cultures of human T cells (CD25+FOXP3+T-Cells, n=3, mean±SEM). CD4+T cells were thawed and maintained in the presence of IL2 (10 ng/ml) for 2 days. In separate cultures, 2×10⁵ CD4+T cells were treated with TNF-α (100 ng/ml) alone or combined with 10 nM TNF-α Blocker etanercept (Enbrel®) or 10 nM of either P55-TNFRSF1a inhibitor EN-1206-Fc-BV (bivalent) or EN-1206-Fc-MV (monovalent) in the absence or presence of 1 g/ml anti-CD3 and anti-CD28 monoclonal antibodies (activating reagents to amplify proliferation of T cells) for 24 hrs (FIGS. 23A and 23B), 48 hrs (FIGS. 23C and 23D), and 72 hrs (FIGS. 23E and 23F). Cultures were analyzed by FACS gated for CD25^{hi} FOXP3+ without activation (top panels) or with activation (bottom panels). For the bar-graph representation of the FACS data (FIGS. 23B, 23D, and 23F) statistical significance is represented as: *<p0.05. **<p0.01, ***<p0.001 for differences between the samples. The solid bar under each ‘*’ indicates the samples being compared. Background levels of staining intensity were lower in the non-activated samples, but in each sample the highest intensity of staining for Treg cells was present in samples treated with TNF+IL2 as shown on the FACS diagram, and the bar-graph to the right. The bar-graph shows about 67% reduction in FOXP3 with Enbrel, but only 33% reduction when treated with EN-1206-Fc-MV or -BV.

[0307] FIGS. 24A and 24B are graphs of TNF-α binding assay data from US 2014/0112929 A1 for comparison with the data herein. FIG. 24A is a graph showing the results of a TNF-α receptor binding assay (RBA) comparing the effect of a non-competitive TNFR1 binding protein (DOM1 h-574-208) and a competitive TNFR1 binding protein (DOM1 h-131-206) on the ability of a TNF-α to bind TNFR1; compare with FIG. 12B. FIG. 24B is a graph showing the results of a TNF-α function assay showing that both competitive and non-competitive TNFR1 binding proteins are capable of inhibiting TNF-α signal transduction; compare with FIGS. 13A and 13B.

### DETAILED DESCRIPTION

[0308] Outline
[0309] A. DEFINITIONS
[0310] B. OVERVIEW OF CONSTRUCTS AND METHODS
[0311] C. TUMOR NECROSIS FACTOR (TNF) AND CHRONIC INFLAMMATORY AND AUTOIMMUNE DISEASES AND DISORDERS
[0312] 1. Tumor Necrosis Factor (TNF)
[0313] 2. Tumor Necrosis Factor Receptors (TNFRs)
   [0314] a. TNFR1
   [0315] b. TNFR2
[0316] 3. Regulatory T Cells (Tregs) and Their Role in the Autoimmune Microenvironment
[0317] 4. Autoimmune/Inflammatory Diseases Mediated by or involving TNF
   [0318] a. Arthritis
      [0319] i. Rheumatoid Arthritis and other types of arthritis
   [0320] b. Inflammatory Bowel Disease (IBD) and Uveitis
   [0321] c. Fibrotic Diseases
   [0322] d. Tumor Necrosis Factor Receptor-Associated Periodic Syndrome (TRAPS)
   [0323] e. Other Diseases Mediated by or involving TNF
      [0324] i. Neurodegenerative Diseases
         [0325] a) Alzheimer's Disease
         [0326] b) Parkinson's Disease
         [0327] c) Multiple Sclerosis (MS)
      [0328] ii. Endometriosis
      [0329] iii. Cardiovascular Disease
      [0330] iv. Acute Respiratory Distress Syndrome (ARDS)
      [0331] v. Severe Acute Respiratory Syndrome (SARS) and COVID-19
[0332] D. THERAPIES FOR RHEUMATOID ARTHRITIS AND OTHER CHRONIC INFLAMMATORY AND AUTOIMMUNE DISEASES AND DISORDERS
   [0333] 1. Conventional Synthetic Disease Modifying Anti-Rheumatic Drugs (csDMARDs)
   [0334] 2. Anti-TNF Therapies/TNF Blockers
[0335] E. THERAPEUTICS FOR TARGETING TNFR1/TNFR2
   [0336] 1. TNFR1-Selective Antagonists
      [0337] a. TNFR1 antagonistic Antibodies
      [0338] b. Monovalent TNFR1 antagonistic Antibodies/Antibody Fragments
         [0339] i. Fab- and scFv-Based TNFR1 antagonists
         [0340] ii. Domain Antibody (dAb)-Based TNFR1 antagonists
         a) Anti-TNFR1 dAb-Anti-Albumin dAb Fusion Constructs
         b) Domain antibody fragments designated GSK1995057 and GSK2862277
         [0341] iii. Nanobodies (Nbs)
         [0342] iv. Anti-TNFR1 Nanobody-Anti-Albumin Nanobody Fusion Constructs
      [0343] c. Dominant-Negative Inhibitors of TNF (DN-TNFs)/TNF Muteins
   [0344] 2. TNFR2-Selective Agonists
      [0345] a. TNFR2 agonistic Antibodies
      [0346] b. TNFR2-Selective TNF Muteins and Fusions Thereof
   [0347] 3. Anti-TNFR2 Antagonistic Antibodies and Small Molecule Inhibitors
[0348] F. SELECTIVE TARGETING OF THE TNFR1 AND/OR THE TNFR1 AND TNFR2 AXIS
   [0349] 1. Selective Blockade of TNFR1 with TNFR1 antagonists
   [0350] 2. Selective Activation of TNFR2 with TNFR2 agonists
   [0351] 3. TNFR1 antagonist constructs, TNFR2 agonist constructs; Multi-Specific, Including Bi-Specific, TNFR1 Antagonist and TNFR2 Agonist Constructs
   [0352] 4. Components of the TNFR1 antagonist constructs
      [0353] a. TNFR1 inhibitor moiety (TNFR1 antagonist)
      [0354] b. Linkers
         [0355] i. Peptide Linkers
         a) Flexible linkers
         b) Rigid linkers
         [0356] ii. Chemical Linkers
      [0357] c. Fc-Activity modifiers
         [0358] i. Modifications to the Fc portions
         a) Knobs-in-Holes
         b) Modifications that Enhance Neonatal Fe Receptor (FcRn) Recycling
         c) Enhancement of or Reduction/Elimination of Fc Immune Effector Functions
         [0359] ii. Other Modifications of Fc portions
         [0360] iii. Human Serum Albumin
      [0361] d. Additional Activity Modifiers—Fusion Proteins that Include Portions or Entire Polypeptides that Increase Serum Half-Life
[0362] G. ASSESSING TNFR1 ANTAGONIST AND TNFR1 ANTAGONIST/TNFR2 AGONIST CONSTRUCT ACTIVITY AND EFFICACY
   [0363] 1. Disease Activity Score (DAS28)
   [0364] 2. SOMAscan® Proteomic Analysis and other proteomic tools for quantifying analytes
   [0365] 3. Transcriptome Analysis to Predict Responsiveness to Therapy and to select subjects likely to benefit from treatment
   [0366] 4. L929 Cytotoxicity Assay
   [0367] 5. HeLa IL-8 Assay
   [0368] 6. HUVEC Assay
   [0369] 7. Quantification and Evaluation of Treg Cell Activity
   [0370] 8. Evaluation of Binding Properties of the TNFR1 antagonist/TNFR2 Agonist Constructs
   [0371] 9. Antibody-Dependent Cellular Cytotoxicity (ADCC) and Complement-Dependent Cytotoxicity (CDC) Assays
   [0372] 10. Disease Models
      [0373] a. Collagen-Induced Arthritis (CIA)
      [0374] b. Rheumatoid Arthritis Synovial Membrane Mononuclear Cell Cultures
      [0375] c. Tg197 Mouse Model of Arthritis
      [0376] d. AARE Mouse Model of Arthritis/IBD
      [0377] e. Humanized TNF/TNFR2 Mice
[0378] H. METHODS OF PRODUCING NUCLEIC ACIDS ENCODING TNFR1 ANTAGONIST CONSTRUCTS AND TNFR1 ANTAGONIST/TNFR2 AGONIST CONSTRUCTS
   [0379] 1. Isolation or Preparation of Nucleic Acids Encoding TNFR1 Antagonist and TNFR2 Agonist Polypeptides
   [0380] 2. Generation of Mutant or Modified Nucleic Acids and Encoding Polypeptides
   [0381] 3. Vectors and Cells
   [0382] 4. Expression
      [0383] a. Prokaryotic Cells
      [0384] b. Yeast Cells
      [0385] c. Insects and Insect Cells
      [0386] d. Mammalian Expression Cells
      [0387] e. Plants
   [0388] 5. Purification
   [0389] 6. Additional Modifications
      [0390] a. PEGylation
      [0391] b. Albumination
      [0392] c. Purification Tags
   [0393] 7. Nucleic Acid Molecules and Gene Therapy
[0394] I. COMPOSITIONS, FORMULATIONS AND DOSAGES
   [0395] 1. Formulations
   [0396] 2. Administration of the TNFR1 Antagonist Constructs, TNFR2 Agonist Constructs, the Multi-specific, such as Bi-Specific, Constructs and Nucleic acids
   [0397] 3. Administration of Nucleic Acids Encoding Polypeptides (Gene Therapy)
[0398] J. THERAPEUTIC USES AND METHODS OF TREATMENT
   [0399] 1. Treatment of Chronic Inflammatory/Autoimmune Diseases and Disorders
   [0400] 2. Treatment of Neurodegenerative and Demyelinating Diseases and Disorders
   [0401] 3. Treatment of Cancer and other Immunosuppressing Diseases, Disorders, and Conditions
   [0402] 4. Combination Therapies
[0403] K. EXAMPLES

### A. Definitions

[0404] Unless defined otherwise, all technical and scientific terms used herein have the same meaning as is commonly understood by one of skill in the art to which the invention(s) belong. All patents, patent applications, published applications and publications, GenBank sequences, databases, websites and other published materials referred to throughout the entire disclosure herein, unless noted otherwise, are incorporated by reference in their entirety. In the event that there are a plurality of definitions for terms herein, those in this section prevail. Where reference is made to a URL or other such identifier or address, it is understood that such identifiers can change, and particular information on the internet can come and go, but equivalent information can be found by searching the internet. Reference thereto evidences the availability and public dissemination of such information.

[0405] As used herein, a construct is a product that contains one more components, generally at least two. The components can be polypeptides, small molecules, aptamers, nucleic acids, and/or other such components as described herein or known to those of skill in the art. Various constructs are described and exemplified herein; the components and variety thereof is apparent from the description herein. Those of skill in the art in view of the description can envision other constructs that are within the disclosure and claims herein. The term construct is employed because the products can include a variety of different types of components.

[0406] As used herein, a construct that is a TNFR1 construct or a TNFR2 antagonist construct, is a construct that comprises a TNFR1 inhibitor moiety, which is a moiety that inhibits or reduces a TNFR1 activity, such as signaling.

[0407] As used herein, a construct that is a TNFR2 construct or a TNFR2 agonist construct, is a construct that comprises a TNFR2 agonist moiety, which is a moiety that activates or induces an activity of a TNFR2, such as signaling or an activity the results in increased Treg cells.

[0408] As used herein, a construct that is a TNFR2 antagonist construct, is a construct that comprises a TNFR2 antagonist.

[0409] As used herein, a construct that is a multi-specific construct is a construct that comprises more than one antagonist or agonist or both moieties, such as a construct that contains a TNFR1 inhibitor and a TNFR2 agonist, or a construct that contains two TNFR1 antagonists, such as where each interacts with a different epitope on TNFR1 or each has a different TNFR1 antagonist activity, or two TNFR2 agonists, such as where each interacts with a different TNFR2 epitope, or each has a different TNFR2 agonist activity.

[0410] As used herein, “tumor necrosis factor,” “tumor necrosis factor alpha,” “TNF,” “TNF-alpha,” “TNF-α” and “TNFα” are used interchangeably to refer to a pleiotropic proinflammatory cytokine that is a member of the TNF superfamily and is associated with inflammatory and immuno-regulatory activities, including the regulation of tumorigenesis/cancer, host defense against pathogenic infections, apoptosis, autoimmunity, and septic shock. When other members of the TNF superfamily are intended, they will be identified by name. TNF participates in coordination of innate and adaptive immune responses, as well as in organogenesis, particularly of the lymphoid organs. TNF is produced as a homotrimeric membrane-bound protein containing 233 amino acids that can be cleaved by the protease TACE (TNF alpha converting enzyme; also known as ADAM17) to release soluble TNF (solTNF), which contains 157 amino acids; membrane-bound and soluble forms of TNF are biologically active. Homotrimers of TNF bind to and signal through two high-affinity, specific receptors, TNFR1 and TNFR2; membrane-bound TNF primarily activates TNFR2, while soluble TNF primarily activates TNFR1. The uncontrolled or dysregulated production of TNF is associated with several chronic inflammatory and autoimmune diseases and conditions, including, but not limited to, for example, septic shock, rheumatoid arthritis, psoriasis, psoriatic arthritis, ankylosing spondylitis, juvenile idiopathic arthritis, and inflammatory bowel disease (IBD), as well as neurodegenerative and demyelinating diseases and conditions, including, but not limited to, for example, Alzheimer's disease, Parkinson's disease, stroke and multiple sclerosis.

[0411] As used herein, a “TNF mutein” or “TNF-α mutein” or “modified TNF polypeptide” refers to a polypeptide that has an amino acid sequence that, for TNF from a particular species, differs from the amino acid sequence of a corresponding wild-type TNF (TNF-α) by one or more amino acids. Generally, such modified TNF polypeptides retain the ability to activate or inhibit TNFR1 and/or TNFR2. Specific mutations in TNF can render the resulting TNF mutein selective for binding to TNFR1 or TNFR2, and can result in TNF muteins with antagonistic or agonistic properties. For example, as described herein, there are TNFR1-selective antagonistic TNF muteins, and TNFR2-selective agonistic TNF muteins.

[0412] As used herein, a “dominant-negative inhibitor of TNF” or “DN-TNF” is a TNF mutein with one or more mutations that abrogate binding to and signaling through TNFR1 and/or TNFR2. DN-TNFs selectively inhibit soluble TNF (sTNF or solTNF) by rapidly exchanging subunits with native TNF homotrimers, forming inactive mixed TNF heterotrimers with disrupted receptor binding surfaces, thus preventing interaction with TNF receptors. DN-TNFs leave transmembrane TNF (tmTNF) unaffected, maintaining the protective roles of TNF signaling through TNFR2. Examples of DN-TNFs are TNF mutants containing one or more of the replacements L133Y, S162Q, Y163H, I173T, Y191Q and A221R, with reference to the sequence of amino acids set forth in SEQ ID NO:1 (corresponding to residues L57Y, S86Q, Y87H, I97T, Y115Q, and A145R, with reference to the sequence of solTNF, as set forth in SEQ ID NO:2), which impair binding to TNFRs.

[0413] As used herein, a “modification” is in reference to the modification of a sequence of amino acids in a polypeptide, or a sequence of nucleotides in a nucleic acid molecule, and includes deletions, insertions, transpositions, replacements and combinations thereof of amino acids or nucleotides, respectively. Methods of modifying a polypeptide or nucleic acid are routine to those of skill in the art, such as by using recombinant DNA methodologies.

[0414] As used herein, “deletion,” when referring to a nucleic acid or polypeptide sequence, refers to the deletion of one or more nucleotides or amino acids compared to a sequence, such as a target polynucleotide or polypeptide, or a native or wild-type sequence.

[0415] As used herein, “insertion,” when referring to a nucleic acid or amino acid sequence, describes the inclusion of one or more additional nucleotides or amino acids, within a target, native, wild-type or other related sequence. Thus, a nucleic acid molecule that contains one or more insertions compared to a wild-type sequence, contains one or more additional nucleotides within the linear length of the sequence.

[0416] As used herein, “addition,” when referring to a nucleic acid or amino acid sequence, describes the addition of one or more nucleotides or amino acids onto either termini, compared to another sequence.

[0417] As used herein, a “substitution” or “replacement” refers to the replacing of one or more nucleotides or amino acids in a native, target, wild-type or other nucleic acid or polypeptide sequence, with an alternative nucleotide or amino acid, without changing the length (as described in numbers of residues) of the molecule. Thus, one or more substitutions in a molecule does not change the number of amino acid residues or nucleotides of the molecule. Amino acid replacements compared to a particular polypeptide can be expressed in terms of the number of the amino acid residue along the length of the polypeptide sequence. For example, a modified polypeptide having a modification in the amino acid at the 100^{th} position of the amino acid sequence that is a substitution/replacement of tyrosine (Tyr; Y) with glutamic acid (Glu; E), can be expressed as Y100E, Tyr100Glu, or 100E. Y100 can be used to indicate that the amino acid at the modified 100^{th} position is a tyrosine. For purposes herein, since modifications are in a heavy chain (HC) or light chain (LC) of an antibody, modifications also can be denoted by reference to HC- or LC- to indicate the chain of the polypeptide.

[0418] As used herein, “at a position corresponding to,” or recitation that nucleotides or amino acid positions “correspond to” nucleotides or amino acid positions in a disclosed sequence, such as set forth in the Sequence Listing, refers to nucleotides or amino acid positions identified upon alignment with a referenced sequence to maximize identity using a standard alignment algorithm, such as the GAP algorithm. By aligning the sequences, one skilled in the art can identify corresponding residues, for example, using conserved and identical amino acid residues as guides. In general, to identify corresponding positions, the sequences of amino acids are aligned so that the highest order match is obtained (see, e.g., Computational Molecular Biology, Lesk, A. M., ed., Oxford University Press, New York, 1988; Biocomputing: Informatics and Genome Projects, Smith, D. W., ed., Academic Press, New York, 1993; Computer Analysis of Sequence Data, Part I, Griffin, A. M., and Griffin, H. G., eds., Humana Press, New Jersey, 1994; Sequence Analysis in Molecular Biology, von Heinje, G., Academic Press, 1987; Sequence Analysis Primer, Gribskov, M. and Devereux, J., eds., M Stockton Press, New York, 1991; and Carrillo et al. (1988) SIAM J. Applied Math 48:1073).

[0419] As used herein, alignment of a sequence refers to the use of homology to align two or more sequences of nucleotides or amino acids. Typically, two or more sequences that are related by 50% or more identity are aligned. An aligned set of sequences refers to 2 or more sequences that are aligned at corresponding positions and can include aligning sequences derived from RNAs, such as ESTs and other cDNAs, aligned with a genomic DNA sequence. Related or variant polypeptides or nucleic acid molecules can be aligned by any method known to those of skill in the art. Such methods typically maximize matches, and include methods, such as using manual alignments and by using the numerous alignment programs available (e.g., BLASTP) and others known to those of skill in the art. By aligning the sequences of polypeptides or nucleic acids, one skilled in the art can identify analogous portions or positions, using conserved and identical amino acid residues as guides. Further, one skilled in the art also can employ conserved amino acid or nucleotide residues as guides to find corresponding amino acid or nucleotide residues between and among human and non-human sequences. Corresponding positions also can be based on structural alignments, for example, by using computer simulated alignments of protein structure. In other instances, corresponding regions can be identified. One skilled in the art also can employ conserved amino acid residues as guides to find corresponding amino acid residues between and among human and non-human sequences.

[0420] As used herein, recitation that proteins are “compared under the same conditions” means that different proteins are treated identically or substantially identically such that any one or more conditions that can influence the activity or properties of a protein or agent are not varied or not substantially varied between the test agents. For example, when the activity of an antibody is compared to another antibody, any one or more conditions, such as the amount or concentration of the polypeptide; the presence, including amount, of excipients, carriers or other components in a formulation other than the active agent (e.g., antibody); temperature; pH; time of storage; storage vessel; properties of storage (e.g., agitation); and/or other conditions associated with exposure or use, are identical or substantially identical between and among the compared polypeptides/antibodies.

[0421] As used herein, an “adverse effect,” or “side effect,” or “adverse event,” or “adverse side effect,” refers to a harmful, deleterious and/or undesired effect associated with administering a therapeutic agent. For example, side effects associated with the administration of an anti-TNF antibody, such as adalimumab (sold, for example, under the trademark Humira®), are known to one of skill in the art, and some are described herein. Such adverse side effects include, for example, serious infections, such as tuberculosis, and other infections caused by viruses, fungi and bacteria, including upper respiratory infections, as well as dermatological and dermal toxicity, such as rash, headaches and nausea. Thus, “adverse effect” or “side effect” refers to a harmful, deleterious and/or undesired effect of administering a therapeutic agent. Side effects or adverse effects are graded on toxicity, and various toxicity scales exist, providing definitions for each grade. Examples of such scales are toxicity scales of the National Cancer Institute Common Toxicity Criteria version 2.0, and the World Health Organization or Common Terminology Criteria for Adverse Events (CTCAE) scale. Assigning grades of severity is within the skill of an experienced physician or other health care professional. The severity of symptoms can be quantified using the NCI Common Terminology Criteria for Adverse Events (CTCAE) grading system. The CTCAE is a descriptive terminology used for Adverse Event (AE) reporting. The grading (severity) scale is provided for each AE term. The CTCAE displays Grades 1 through 5, with clinical descriptions for severity for each adverse event based on the following general guideline: Grade 1 (Mild AE); Grade 2 (Moderate AE); Grade 3 (Severe AE); Grade 4 (Life-threatening or disabling AE); and Grade 5 (Death related to AE/fatal).

[0422] As used herein, a “property” of a polypeptide, such as an antibody, refers to any property exhibited by a polypeptide, including, but not limited to, binding specificity, structural configuration or conformation, protein stability, resistance to proteolysis, conformational stability, thermal tolerance, and tolerance to pH conditions. Changes in properties can alter an “activity” of the polypeptide. For example, a change in the binding specificity of the antibody polypeptide can alter the ability to bind an antigen, and/or various binding activities, such as affinity or avidity, or in vivo activities of the polypeptide.

[0423] As used herein, an “activity” or a “functional activity” of a polypeptide, such as an antibody, refers to any activity exhibited by the polypeptide. Such activities can be empirically determined. Exemplary activities include, but are not limited to, the ability to interact with a biomolecule, for example, through antigen-binding, DNA binding, ligand binding, or dimerization; and enzymatic activity, for example, kinase activity or proteolytic activity. For an antibody (including antibody fragments), activities include, but are not limited to, the ability to specifically bind a particular antigen, affinity of antigen-binding (e.g., high or low affinity), avidity of antigen-binding (e.g., high or low avidity), on-rate, off-rate, effector functions, such as the ability to promote antigen neutralization or clearance, virus neutralization, and in vivo activities, such as the ability to prevent infection or invasion of a pathogen, or to promote clearance, or to penetrate a particular tissue or fluid or cell in the body. Activity can be assessed in vitro or in vivo using recognized assays, such as ELISA, flow cytometry, surface plasmon resonance or equivalent assays to measure on- or off-rate, immunohistochemistry and immunofluorescence histology and microscopy, cell-based assays, flow cytometry, and binding assays (e.g., panning assays). For example, for an antibody polypeptide, activities can be assessed by measuring binding affinities, avidities, and/or binding coefficients (e.g., for on-/off-rates), and other activities in vitro, or by measuring various effects in vivo, such as immune effects, e.g., antigen clearance; penetration or localization of the antibody into tissues; protection from disease, e.g., infection; serum or other fluid antibody titers; or other assays that are well-known in the art. The results of such assays that indicate that a polypeptide exhibits an activity can be correlated to activity of the polypeptide in vivo, in which in vivo activity can be referred to as therapeutic activity, or biological activity. Activity of a modified polypeptide can be any level of percentage of activity of the unmodified polypeptide, including but not limited to, 1% of the activity, 2%, 3%, 4%, 5%, 10%, 20%, 30%, 40%, 50%, 60%, 70%, 80%, 90%, 91%, 92%, 93%, 94%, 95%, 96%, 97%, 98%, 99%, 100%, 200%, 300%, 400%, 500%, or more, of activity compared to the unmodified polypeptide. Assays to determine functionality or activity of modified (or variant) antibodies are well-known in the art.

[0424] As used herein, “bind,” “bound,” and grammatical variations thereof, refers to the participation of a molecule in any attractive interaction with another molecule, resulting in a stable association in which the two molecules are in close proximity to one another. Binding interactions include, but are not limited to, non-covalent bonds, covalent bonds (such as reversible and irreversible covalent bonds), and includes interactions between molecules, such as, but not limited to, proteins, nucleic acids, carbohydrates, lipids, and small molecules, such as chemical compounds, including drugs. Exemplary bonds are antibody-antigen interactions and receptor-ligand interactions. When an antibody “binds” a particular antigen, “bind” refers to the specific recognition of the antigen by the antibody, through cognate antibody-antigen interaction, at antibody combining sites. Binding also can include the association of multiple chains of a polypeptide, such as antibody chains, which interact through disulfide bonds.

[0425] As used herein, “binding activity” refers to characteristics of a molecule, e.g., a polypeptide, relating to whether or not, and how, it binds one or more binding partners. Binding activities include the ability to bind the binding partner(s), the affinity with which it binds to the binding partner (e.g., high affinity), the avidity with which it binds to the binding partner, the strength of the bond with the binding partner, and/or the specificity for binding with the binding partner.

[0426] As used herein, “affinity” or “binding affinity” describes the strength of the interaction between two or more molecules, such as binding partners, and typically, the strength of the noncovalent interactions between two binding partners. The affinity of an antibody or antigen-binding fragment thereof for an antigen epitope is the measure of the strength of the total noncovalent interactions between a single antibody combining site and the epitope. Low-affinity antibody-antigen interaction is weak, and the molecules tend to dissociate rapidly, while high affinity antibody-antigen binding is strong and the molecules remain bound for a longer amount of time. Binding affinity can be determined in terms of binding kinetics, such as by measuring rates of association (kₐ or kₒₙ) and/or dissociation (k_{d} or k_{off}), half maximal effective concentration (EC₅₀) values, and/or thermodynamic data (e.g., Gibbs free energy (ΔG), enthalpy (ΔH), entropy (−TΔS), and/or calculating association (Kₐ) or dissociation (K_{d}) constants. EC₅₀, also called the apparent K_{d}, is the concentration (e.g., ng/mL) of antibody, where 50% of the maximal binding is observed to a fixed amount of antigen. Typically, EC₅₀ values are determined from sigmoidal dose-response curves, where the EC₅₀ is the concentration at the inflection point. A high antibody affinity for its substrate correlates with a low EC₅₀ value, and a low affinity corresponds to a high EC₅₀ value. Affinity constants can be determined by standard kinetic methodology for antibody reactions, for example, immunoassays, such as ELISA, followed by curve-fitting analysis.

[0427] As used herein, “affinity constant” refers to an association constant (Kₐ) used to measure the affinity of an antibody for an antigen. The higher the affinity constant, the greater the affinity of the antibody for the antigen. Affinity constants are expressed in units of reciprocal molarity (i.e., M⁻¹), and can be calculated from the rate constant for the association-dissociation reaction, as measured by standard kinetic methodology for antibody reactions (e.g., immunoassays, surface plasmon resonance, or other kinetic interaction assays known in the art). The binding affinity of an antibody also can be expressed as a dissociation constant, or K_{d}. The dissociation constant is the reciprocal of the association constant, i.e., K_{d}=1/Kₐ. Hence, an affinity constant also can be represented by the K_{d}. Affinity constants can be determined by standard kinetic methodology for antibody reactions, for example, immunoassays, surface plasmon resonance (SPR) (see, e.g., Rich and Myszka (2000) Curr. Opin. Biotechnol 11:54; Englebienne (1998) Analyst. 123:1599), isothermal titration calorimetry (ITC) or other kinetic interaction assays known in the art (see, e.g., Paul, ed., Fundamental Immunology, 2nd ed., Raven Press, New York, pages 332-336 (1989); see also, U.S. Pat. No. 7,229,619, for a description of exemplary SPR and ITC methods for calculating the binding affinity of antibodies).

[0428] Instrumentation and methods for real time detection and monitoring of binding rates are known and are commercially available (e.g., BIAcore 2000, BIAcore AB, Upsala, Sweden and GE Healthcare Life Sciences; Malmqvist (2000) Biochem. Soc. Trans. 27:335).

[0429] Methods for calculating affinity are well-known, such as methods for determining EC₅₀ values, or methods for determining association/dissociation constants. For example, in terms of EC₅₀, high binding affinity means that the antibody specifically binds to a target protein with an EC₅₀ that is less than about 10 ng/mL, 9 ng/mL, 8 ng/mL, 7 ng/mL, 6 ng/mL, 5 ng/mL, 3 ng/mL, 2 ng/mL, 1 ng/mL or less. High binding affinity also can be characterized by an equilibrium dissociation constant (K_{d}) of 10⁻⁶ M or lower, such as 10⁻⁷ M, 10⁻⁸ M, 10⁻⁹ M, 10⁻¹⁰ M, 10⁻¹¹ M, or 10⁻¹² M, or lower. In terms of equilibrium association constant (Kₐ), high binding affinity is generally associated with Kₐ values of greater than or equal to about 10⁶ M⁻¹, greater than or equal to about 10⁷ M⁻¹, greater than or equal to about 10⁸ M⁻¹, or greater than or equal to about 10⁹ M⁻¹, 101° M⁻¹, 10¹¹ M⁻¹, or 10¹² M⁻¹. Affinity can be estimated empirically, or affinities can be determined comparatively, e.g., by comparing the affinity of two or more antibodies for a particular antigen, for example, by calculating pairwise ratios of the affinities of the antibodies tested. For example, such affinities can be readily determined using conventional techniques, such as by ELISA; equilibrium dialysis; surface plasmon resonance; by radioimmunoassay using a radiolabeled target antigen; or by another method known to the skilled artisan. The affinity data can be analyzed, for example, by the method of Scatchard et al., (1949) Ann N.Y. Acad. Sci., 51:660, or by curve fitting analysis, for example, using a 4 Parameter Logistic nonlinear regression model using the equation: y=((A−D)/(1+((x/C)\hat{ }B)))+D, where A is the minimum asymptote, B is the slope factor, C is the inflection point (EC₅₀), and D is the maximum asymptote.

[0430] As used herein, “antibody avidity” refers to the strength of multiple interactions between a multivalent antibody and its cognate antigen, such as with antibodies containing multiple binding sites associated with an antigen with repeating epitopes or an epitope array. A high avidity antibody has a higher strength of such interactions compared to a low avidity antibody.

[0431] As used herein, “specificity for a target,” such as TNFR1, refers to a preference, higher binding affinity, for binding to the target compared to a non-target. Selective binding refers to binding to a target with an affinity, generally, of at least about 10⁷-10⁸ M⁻¹. It also can refer to relative activity in which the affinity of a moiety or molecule for one target molecule is compared to the affinity for another molecule, and if the difference is of a certain magnitude, such as about 10-fold, the moiety or molecule is said to have greater specificity for the first target relative to the second.

[0432] As used herein, “specifically binds” or “immunospecifically binds,” with respect to an antibody or antigen-binding fragment thereof, are used interchangeably herein and refer to the ability of the antibody or antigen-binding fragment to form one or more noncovalent bonds with a cognate antigen, by noncovalent interactions between the antibody combining site(s) of the antibody and the antigen. Typically, an antibody that immunospecifically binds (or that specifically binds), for example, to TNFR1, is one that binds to TNFR1 with an affinity constant (Kₐ) of about or 1×10⁷ M⁻¹ or 1×10⁸ M⁻¹ or greater (or a dissociation constant (K_{d}) of 1×10⁻⁷ M or 1×10⁻⁸ M or less). Antibodies or antigen-binding fragments that immunospecifically bind to a particular antigen can be identified, for example, by immunoassays, such as radioimmunoassays (RIA), enzyme-linked immunosorbent assays (ELISAs), surface plasmon resonance (SPR), or other techniques known to those of skill in the art.

[0433] As used herein, “steric effects” refer to the effects of the size of atoms or groups on the molecule. Steric effects include, but are not limited to, steric hindrance and van der Waals repulsion. Steric effects are the effects resulting from the fact that atoms occupy space; when atoms are put close to each other, this costs energy, as the electrons near the atoms repel each other.

[0434] As used herein, “exhibits at least one activity” or “retains at least one activity” refers to the activity exhibited by an antibody polypeptide, such as a variant antibody or other therapeutic polypeptide, compared to the target or unmodified polypeptide, that does not contain the modification. A modified, or variant, polypeptide that retains an activity of a target polypeptide can exhibit improved activity, decreased activity, or maintain the activity of the unmodified polypeptide. In some instances, a modified, or variant, polypeptide can retain an activity that is increased compared to a target or unmodified polypeptide. In some cases, a modified, or variant, polypeptide can retain an activity that is decreased compared to an unmodified or target polypeptide. Activity of a modified, or variant, polypeptide can be any level of percentage of activity of the unmodified or target polypeptide, including but not limited to, 1% of the activity, 2%, 3%, 4%, 5%, 10%, 20%, 30%, 40%, 50%, 60%, 70%, 80%, 90%, 91%, 92%, 93%, 94%, 95%, 96%, 97%, 98%, 99%, 100%, 200%, 300%, 400%, 500%, or more activity, compared to the unmodified or target polypeptide. In other embodiments, the change in activity is at least about 2 times, 3 times, 4 times, 5 times, 6 times, 7 times, 8 times, 9 times, 10 times, 20 times, 30 times, 40 times, 50 times, 60 times, 70 times, 80 times, 90 times, 100 times, 200 times, 300 times, 400 times, 500 times, 600 times, 700 times, 800 times, 900 times, 1000 times, or more times, greater than the unmodified or target polypeptide. Assays for retention of an activity depend on the activity to be retained.

[0435] Such assays can be performed in vitro or in vivo. Activity can be measured, for example, using assays known in the art and described below for activities, such as, but not limited to, ELISA and panning assays. Activities of a modified, or variant, polypeptide compared to an unmodified or target polypeptide also can be assessed in terms of an in vivo therapeutic or biological activity or result following administration of the polypeptide.

[0436] As used herein, the “surface plasmon resonance” refers to an optical phenomenon that allows for the analysis of real-time interactions by detection of alterations in protein concentrations within a biosensor matrix. Commercial systems are available. For example, the BIAcore system (GE Healthcare Life Sciences) is an exemplary commercial system.

[0437] As used herein, “antibody” refers to immunoglobulins and immunoglobulin fragments, whether natural, or partially or wholly synthetically, such as recombinantly, produced, including any fragment thereof containing at least a portion of the variable heavy chain and/or variable light chain regions of the immunoglobulin molecule that is sufficient to form an antigen-binding site and, when assembled, to specifically bind an antigen. Hence, an antibody includes any protein having a binding domain that is homologous or substantially homologous to an immunoglobulin antigen-binding domain (antibody combining site). For example, an antibody refers to an antibody that contains two heavy chains (which can be denoted H and H′) and two light chains (which can be denoted L and L′), where each heavy chain can be a full-length immunoglobulin heavy chain or a portion thereof sufficient to form an antigen-binding site (e.g., heavy chains include, but are not limited to, V_{H} chains, V_{H}-C_{H}1 chains, and V_{H}-C_{H}1-C_{H}2-C_{H}3 chains), and each light chain can be a full-length light chain or a portion thereof sufficient to form an antigen-binding site (e.g., light chains include, but are not limited to, V_{L} chains and V_{L}-C_{L} chains). Each heavy chain (H and H′) pairs with one light chain (L and L′, respectively). Typically, antibodies minimally include all or at least a portion of the variable heavy (V_{H}) chain and/or the variable light (V_{L}) chain. An antibody also can include other regions, such as, for example, all or a portion of the constant region, and/or all or a portion (sufficient to provide flexibility) of the hinge region.

[0438] For purposes herein, the term “antibody,” unless otherwise specified, includes full-length antibodies and portions thereof, including antibody fragments, such as, for example, anti-TNFR1, antibody fragments. Antibody fragments, include, but are not limited to, for example, Fab fragments, Fab′ fragments, F(ab′)₂ fragments, Fv fragments, disulfide-linked Fvs (dsFv), Fd fragments, Fd′ fragments, single-chain Fvs (scFvs), single-chain Fabs (scFab), hsFv (helix-stabilized Fv), single domain antibodies (dAbs, or sdAbs), minibodies, diabodies, anti-idiotypic (anti-Id) antibodies, nanobodies and camelid antibodies, free light chains, VHH antibodies (or nanobodies), or antigen-binding fragments of any of the above. Antibody fragments also can include combinations of any of the above fragments, such as, for example, tandem scFv, Fab-scFv (HC C-term, or LC C-term), Fab-(scFv)₂ (C-term), scFv-Fab-scFv, Fab-C_{H}2-scFv, scFv fusions (C term, or N term), Fab-fusions (HC C-term, or LC C-term), scFv-scFv-dAb, scFv-dAb-scFv, dAb-scFv-scFv, and tribodies. The term “antibody” includes synthetic antibodies, recombinantly produced antibodies, multi-specific and heteroconjugate antibodies (e.g., bi-, tri- and quad-specific antibodies, diabodies, triabodies and tetrabodies), human antibodies, non-human antibodies, humanized antibodies, chimeric antibodies, and intrabodies. Antibodies provided herein include members of any immunoglobulin class (e.g., IgG, IgM, IgD, IgE, IgA and IgY), any subclass (e.g., IgG1, IgG2, IgG3, IgG4, IgA1 and IgA2) or sub-subclass (e.g., IgG2a and IgG2b).

[0439] As used herein, a “form of an antibody” refers to a particular structure of an antibody. Antibodies herein include full-length antibodies and portions thereof, such as, for example, a Fab fragment or other antibody fragment. Thus, a Fab is a particular form of an antibody.

[0440] As used herein, reference to a “corresponding form” of an antibody means that, when comparing a property or activity of two antibodies, the property is compared using the same form of the antibody. For example, if it is stated that an antibody has less activity compared to the activity of the corresponding form of a first antibody, that means that a particular form, such as a Fab of that antibody, has less activity compared to the Fab form of the first antibody.

[0441] As used herein, a full-length antibody is an antibody having two full-length heavy chains (e.g., V_{H}-C_{H}1-C_{H}2-C_{H}3, or V_{H}-C_{H}1-C_{H}2-C_{H}3-C_{H}4), two full-length light chains (V_{L}-C_{L}), and hinge regions, such as human antibodies produced by antibody secreting B cells, and antibodies with the same domains that are produced synthetically.

[0442] As used herein, a “multi-specific construct” refers to a construct, such as an antibody or construct comprising portions of an antibody, that exhibits affinity for more than one target antigen so that it can specifically interact with the targets. Multi-specific constructs herein can have structures similar to full immunoglobulin molecules and include Fc regions, for example IgG Fc regions, and antigen-binding regions, such as portions that specifically bind to TNFR1 or TNFR2.

[0443] As used herein, a “bispecific construct” refers to a multi-specific construct that has binding specificity for two different antigens. Bispecific constructs include, for example, monoclonal antibodies or antigen-binding fragments thereof linked to a polypeptide region, such as Fc or modified Fc, that modifies the activity of the construct. For human therapeutics, the constructs are derived from human sources or are derived from a human source or are humanized, and the constructs have binding specificities for at least two different antigens. Bi-specific constructs/molecules provided herein can have binding specificities that are directed to TNFR1, and TNFR2. For example, the bi-specific constructs include a TNFR1 antagonist and a TNFR2 agonist. A bispecific antibody or construct includes antibodies and antigen-binding fragment thereof that includes two separate antigen-binding domains (e.g., two scFvs, or two dAbs, or two Fabs, joined by a linker). The antigen-binding domains can bind to the same antigen or different antigens.

[0444] As used herein, “antibody fragment” or “antibody portion” refers to any portion of a full-length antibody that is less than full-length, but contains at least a portion of the variable region(s) of the antibody sufficient to form an antigen-binding site (e.g., one or more complementarity-determining region (CDRs)), and thus, retains the binding specificity and/or an activity of the full-length antibody; antibody fragments include antibody derivatives produced by enzymatic treatment of full-length antibodies, as well as synthetically, e.g., recombinantly, produced derivatives.

[0445] Examples of antibody fragments include, but are not limited to, Fab, Fab′, F(ab)₂, single-chain Fvs (scFvs), Fv, dsFv, diabody, triabody, affibody, nanobody, aptamer, dAb, Fd and Fd fragments (see, for example, Methods in Molecular Biology, Vol 207: Recombinant Antibodies for Cancer Therapy Methods and Protocols (2003); Chapter 1; pp. 3-25, Kipriyanov). The fragment can include multiple chains linked together, such as by disulfide bridges, and/or by peptide linkers. An antibody fragment generally contains at least about 50 amino acids, such as at about or at least 100 amino acids, and typically, at least about or at least 110, 120, 150, 170, 180, or 200 amino acids.

[0446] As used herein, an “Fv antibody fragment” is composed of one variable heavy domain (V_{H}) and one variable light (V_{L}) domain, linked by noncovalent interactions.

[0447] As used herein, a dsFv (disulfide-linked Fv) refers to an Fv with an engineered intermolecular disulfide bond, which stabilizes the V_{H}-V_{L} pair.

[0448] As used herein, an “scFv fragment” refers to an antibody fragment that contains a variable light chain (V_{L}) and variable heavy chain (V_{H}), covalently connected by a polypeptide linker in any order. The linker is of a length, such that the two variable domains are bridged without substantial interference. Exemplary linkers are (Gly-Ser)₁ residues with some Glu or Lys residues dispersed throughout to increase solubility.

[0449] As used herein, “diabodies” are dimeric scFv; diabodies typically have shorter peptide linkers than scFvs, and preferentially dimerize.

[0450] As used herein, “triabodies” are trimeric scFv; they contain three peptide chains, each of which contains one V_{H} domain and one V_{L} domain joined by a short linker (e.g., a linker composed of 1-2 amino acids) to permit intramolecular association of V_{H} and V_{L} domains within the same peptide chain; triabodies typically trimerize.

[0451] As used herein, a “Fab fragment” is an antibody fragment that results from digestion of a full-length immunoglobulin with papain, or a fragment having the same structure that is produced synthetically, e.g., by recombinant methods. A Fab fragment contains a light chain (containing a V_{L} and C_{L}), and another chain containing a variable domain of a heavy chain (V_{H}) and one constant region domain of the heavy chain (C_{H}1).

[0452] As used herein, a “F(ab′)₂ fragment” is an antibody fragment that results from digestion of an immunoglobulin with pepsin at pH 4.0-4.5, or a fragment having the same structure that is produced synthetically, e.g., by recombinant methods. The F(ab′)₂ fragment essentially contains two Fab fragments, where each heavy chain portion contains an additional few amino acids, such as, for example, all or a portion, sufficient to provide flexibility, of the hinge region, including cysteine residues that form disulfide linkages joining the two fragments.

[0453] As used herein, a Fab′ fragment is a fragment containing one half (i.e., one heavy chain and one light chain) of the F(ab′)₂ fragment.

[0454] As used herein, an Fd fragment is a fragment of an antibody containing a variable domain (V_{H}) and one constant region domain (C_{H}1) of an antibody heavy chain.

[0455] As used herein, an Fd′ fragment is a fragment of an antibody containing one heavy chain portion of a F(ab′)₂ fragment.

[0456] As used herein, an Fv′ fragment is a fragment containing only the V_{H} and V_{L} domains of an antibody molecule.

[0457] As used herein, hsFv (helix-stabilized Fv) refers to an antibody fragment in which the constant domains normally present in a Fab fragment have been substituted with a heterodimeric coiled-coil domain (see, e.g., Arndt et al. (2001) J. Mol. Biol. 7:312:221-228).

[0458] As used herein, a “domain antibody,” “single domain antibody,” “sdAb,” or “dAb,” used interchangeably, refers to a monomeric small antibody fragment that contains a variable domain of the heavy chain (V_{H}) or of the light chain (V_{L}) of an antibody. dAbs are the smallest antigen-binding fragments of antibodies; they are about approximately 11-15 kDa in size (about 100-150 amino acids), which is approximately one-tenth the size of a full monoclonal antibody (mAb). There are three complementarity determining regions (CDRs) on each V_{H} and each V_{L}. Each dAb contains three out of the six CDRs, which are the highly diversified loop regions that bind to the target antigen, from a V_{H}-V_{L} pair in an antibody.

[0459] As used herein, a camelid antibody, also referred to as a nanobody or VHHs, lacks a light chain and is composed of two identical heavy chains. They occur naturally in camelids, such as camels and alpacas.

[0460] As used herein, a polypeptide “domain” is a part of a polypeptide (a sequence of 3 or more, generally 5, 10, or more, amino acids) that is structurally and/or functionally distinguishable or definable. An exemplary polypeptide domain is a part of the polypeptide that can form an independently folded structure within a polypeptide made up of one or more structural motifs (e.g., combinations of alpha helices and/or beta strands connected by loop regions), and/or that is recognized by a particular functional activity, such as enzymatic activity, dimerization or antigen-binding. A polypeptide can have one or more, typically more than one, distinct domains. For example, the polypeptide can have one or more structural domains and one or more functional domains. A single polypeptide domain can be distinguished based on structure and function. A domain can encompass a contiguous linear sequence of amino acids. Alternatively, a domain can encompass a plurality of non-contiguous amino acid portions, which are non-contiguous along the linear sequence of amino acids of the polypeptide. Typically, a polypeptide contains a plurality of domains. For example, each heavy chain and each light chain of an antibody molecule contains a plurality of immunoglobulin (Ig) domains, each about 110 amino acids in length. Those of skill in the art are familiar with polypeptide domains and can identify them by virtue of structural and/or functional homology with other such domains. For exemplification herein, definitions are provided, but it is understood that it is well within the skill in the art to recognize particular domains by name. If needed, appropriate software can be employed to identify domains.

[0461] As used herein, a “functional region” of a polypeptide is a region of the polypeptide that contains at least one functional domain (which imparts a particular function, such as an ability to interact with a biomolecule, for example, through antigen-binding, DNA binding, ligand binding, or dimerization, or by enzymatic activity, for example, kinase activity or proteolytic activity); exemplary functional regions of polypeptides are antibody domains, such as V_{H}, V_{L}, C_{H}, C_{L}, and portions thereof, such as CDRs, including CDR1, CDR2 and CDR3, or antigen-binding portions, such as antibody combining sites.

[0462] As used herein, a “structural region” of a polypeptide is a region of the polypeptide that contains at least one structural domain.

[0463] As used herein, an “Ig domain” is a domain, recognized as such by those in the art, that is distinguished by a structure, called the Immunoglobulin (Ig) fold, which contains two beta-pleated sheets, each containing anti-parallel beta strands of amino acids connected by loops. The two beta sheets in the Ig fold are sandwiched together by hydrophobic interactions and a conserved intra-chain disulfide bond. Individual immunoglobulin domains within an antibody chain further can be distinguished based on function. For example, a light chain contains one variable region domain (V_{L}) and one constant region domain (C_{L}), while a heavy chain contains one variable region domain (V_{H}) and three or four constant region domains (C_{H}). Each V_{L}, C_{L}, V_{H}, and C_{H} domain is an example of an immunoglobulin domain.

[0464] As used herein, a “variable domain,” with reference to an antibody, is a specific immunoglobulin (Ig) domain of an antibody heavy or light chain that contains a sequence of amino acids that varies among different antibodies. Each light chain and each heavy chain has one variable region domain (V_{L} and V_{H}, respectively). The variable domains provide antigen specificity, and thus, are responsible for antigen recognition. Each variable region contains complementarity-determining regions (CDRs) that are part of the antigen-binding site domain and framework regions (FRs).

[0465] As used herein, “hypervariable region,” “HV,” “complementarity-determining region,” “CDR” and “antibody CDR” are used interchangeably to refer to one of a plurality of portions within each variable region that together form an antigen-binding site of an antibody. Each variable region domain contains three CDRs, named CDR1, CDR2, and CDR3. The three CDRs are non-contiguous along the linear amino acid sequence, but are proximate in the folded polypeptide. The CDRs are located within the loops that join the parallel strands of the beta sheets of the variable domain.

[0466] As used herein, “antigen-binding domain,” “antigen-binding site,” “antigen-binding fragment,” “antigen combining site” and “antibody combining site” are used synonymously to refer to a domain within an antibody that recognizes and physically interacts with the cognate antigen. A native conventional full-length antibody molecule has two conventional antigen-binding sites, each containing portions of a heavy chain variable region and portions of a light chain variable region. A conventional antigen-binding site contains the loops that connect the anti-parallel beta strands within the variable region domains. The antigen combining sites can contain other portions of the variable region domains. Each conventional antigen-binding site contains three hypervariable regions from the heavy chain and three hypervariable regions from the light chain. The hypervariable regions also are called complementarity-determining regions (CDRs).

[0467] As used herein, “portion thereof,” with reference to an antibody heavy or light chain, or variable heavy or light chain, refers to a contiguous portion thereof that is sufficient to form an antigen-binding site such that, when assembled into an antibody containing a heavy and light chain, it contains at least 1 or 2, typically 3, 4, 5 or all 6 CDRs of the variable heavy (V_{H}) and variable light (V_{L}) chains sufficient to retain at least a portion of the binding specificity of the corresponding full-length antibody containing all 6 CDRs. Generally, a sufficient antigen-binding site requires the CDR3 of the heavy chain (CDRH3). It typically further requires the CDR3 of the light chain (CDRL3). As described herein, one of skill in the art knows and can identify the CDRs based on Kabat or Chothia numbering (see e.g., Kabat, E. A. et al. (1991) Sequences of Proteins of Immunological Interest, Fifth Edition, U.S. Department of Health and Human Services, NIH Publication No. 91-3242; and Chothia, C. et al. (1987) J. Mol. Biol. 196:901-917).

[0468] As used herein, “framework regions” or “FRs” are the domains within the antibody variable region domains that are located within the beta sheets; the FR regions are comparatively more conserved, in terms of their amino acid sequences, than the hypervariable regions. Each variable region contains four framework regions that separate the three hypervariable regions.

[0469] As used herein, a “constant region” domain is a domain in an antibody heavy or light chain that contains a sequence of amino acids that is comparatively more conserved among antibodies than the variable region domain. Each light chain has a single light chain constant region (C_{L}) domain, and each heavy chain contains one or more heavy chain constant region (C_{H}) domains, which include, C_{H}1, C_{H}2, C_{H}3 and C_{H}4. Full-length IgA, IgD and IgG isotypes contain C_{H}1, C_{H}2 and C_{H}3 domains and a hinge region, while IgE and IgM contain C_{H}1, C_{H}2, C_{H}3 and C_{H}4 domains. C_{H}1 and C_{L} domains extend the Fab arm of the antibody molecule, thus contributing to the interaction with the antigen and rotation of the antibody arms. Antibody constant regions can serve effector functions, such as, but not limited to, clearance of antigens, pathogens and toxins to which the antibody specifically binds, e.g., through interactions with various cells, biomolecules and tissues.

[0470] As used herein, an “antibody hinge region” or “hinge region” refers to a polypeptide region in the heavy chain of the gamma, delta and alpha antibody isotypes, that occurs between the C_{H}1 and C_{H}2 domains, joins the Fab and Fc regions, and has no homology with the other antibody domains. This region is rich in proline residues and provides flexibility to IgG, IgD and IgA antibodies, allowing the two “arms” (each containing one antibody combining site) of the Fab portion to be mobile, assuming various angles with respect to one another as they bind an antigen. This flexibility allows the Fab arms to move in order to align the antibody combining sites to interact with epitopes on cell surfaces or other antigens. Two interchain disulfide bonds within the hinge region stabilize the interaction between the two heavy chains.

[0471] In some embodiments provided herein, the synthetically produced antibody fragments contain one or more hinge regions, for example, to promote stability via interactions between two antibody chains. Hinge regions are examples parts of dimerization domains, and, for purposes herein are part of the linkers.

[0472] As used herein, a “fragment crystallizable region” or “Fc” or “Fc region” or “Fc domain” refers to a polypeptide containing the constant region of an antibody heavy chain, excluding the first constant region immunoglobulin domain. Fc refers to the last two constant region immunoglobulin domains of IgA, IgD, and IgG (C_{H}2 and C_{H}3, also referred to as Cγ2 and Cγ3), or the last three constant region immunoglobulin domains of IgE and IgM (C_{H}2, C_{H}3 and C_{H}4). Optionally, an Fc domain can include all or part of the flexible hinge region, which is N-terminal to these domains. For IgA and IgM, the Fc can include the J chain. For an exemplary Fc domain of IgG, Fc contains immunoglobulin domains C_{H}2 and C_{H}3, and optionally, all or part of the hinge between C_{H}1 and C_{H}2 (also referred to as Cγ1 and Cγ2). The boundaries of the Fc region can vary, but typically, include at least part of the hinge region. For purposes herein, Fc also includes any allelic or species variant, or any variant or modified form, such as any variant or modified form of Fc that has altered binding to an Fc receptor (FcR) or alters an Fc-mediated effector function. Mutations in the Fc region and their effects are well-documented in the art.

[0473] As used herein, “Fc chimera” refers to a chimeric polypeptide in which one or more polypeptides is/are linked, directly or indirectly, to an Fc region or a derivative thereof. Typically, an Fc chimera combines the Fc region of an immunoglobulin with another polypeptide. Derivatives of, or modified Fc polypeptides, are known to those of skill in the art.

[0474] As used herein, “Kabat numbering” refers to the index numbering of the IgG1 Kabat antibody (see e.g., Kabat, E. A. et al. (1991) Sequences of Proteins of Immunological Interest, Fifth Edition, U.S. Department of Health and Human Services, NIH Publication No. 91-3242); it permits easy comparison among antibodies, similar to way chymotrypsin numbering permits comparison among proteases. One of skill in the art can identify regions of the constant region using Kabat numbering.

[0475] As used herein, “EU numbering” or “EU index” refer to the numbering scheme of the EU antibody described in Edelman et al., (1969) Proc. Natl. Acad. Sci. USA 63:78-85. “EU index as in Kabat” refers to EU index numbering of the human IgG1 Kabat antibody as set forth in Kabat, E. A. et al. (1991) Sequences of Proteins of Immunological Interest, Fifth Edition, U.S. Department of Health and Human Services, NIH Publication No. 91-3242. EU numbering, or EU numbering as in Kabat, are frequently used by those of skill in the art to number amino acid residues of the Fc regions of the light and heavy antibody chains. For example, one of skill in the art can identify regions of the constant region using EU numbering. For example, the C_{L} domain of the Ig kappa light chain corresponds to residues R108-C214 according to Kabat and EU numbering (see, e.g., Table 2 below). The C_{H}1 domain of IgG1 corresponds to residues 118-215 (EU numbering) or 114-223 (Kabat numbering); C_{H}2 corresponds to residues 231-340 (EU numbering) or 244-360 (Kabat numbering); C_{H}3 corresponds to residues 341-447 (EU numbering) or 361-478 (Kabat numbering).

[0476] The following tables define the numbering for the IgG1 and IgG4 heavy chain constant domains, and the Ig kappa light constant domain, by EU, Kabat, and sequential numbering. Table 1 shows the IgG1 heavy chain constant domain by EU, Kabat and sequential numbering, where sequential numbering is with respect to the sequence of amino acids set forth in SEQ ID NO:9, and identifies residues within the C_{H}1, C_{H}2 and C_{H}3 domains, as well as the hinge region. Table 2 shows the immunoglobulin (Ig) kappa light chain constant domain by EU, Kabat and sequential numbering, where sequential numbering is with respect to the sequence of amino acids set forth in SEQ ID NO:17. In Table 2, the top row (bold) sets forth the amino acid residue number by sequential numbering (with reference to SEQ ID NO:17); the second row (bold) provides the 1-letter code for the amino acid residue at the position indicated by the number in the top row; the third row (in italics) indicates the corresponding Kabat number according to Kabat numbering; and the fourth row indicates the corresponding EU index number according to EU numbering. Table 3 shows the IgG4 heavy chain constant domain by EU, Kabat and sequential numbering, where sequential numbering is with respect to the sequence of amino acids set forth in SEQ ID NO:15, and identifies residues within the C_{H}1, C_{H}2 and C_{H}3 domains, as well as the hinge region.

TABLE 1
IgG1 Heavy Chain Constant Domain by
EU, Kabat and Sequential Numbering

Residue Numbering

| | EU | | Sequential | IgG1 |
|---|---|---|---|---|
| Domain | Index | Kabat | (SEQ ID NO: 9) | Sequence |
| CH1 | 118 | 114 | 1 | A |
| CH1 | 119 | 115 | 2 | S |
| CH1 | 120 | 116 | 3 | T |
| CH1 | 121 | 117 | 4 | K |
| CH1 | 122 | 118 | 5 | G |
| CH1 | 123 | 119 | 6 | P |
| CH1 | 124 | 120 | 7 | S |
| CH1 | 125 | 121 | 8 | V |
| CH1 | 126 | 122 | 9 | F |
| CH1 | 127 | 123 | 10 | P |
| CH1 | 128 | 124 | 11 | L |
| CH1 | 129 | 125 | 12 | A |
| CH1 | 130 | 126 | 13 | P |
| CH1 | 131 | 127 | 14 | S |
| CH1 | 132 | 128 | 15 | S |
| CH1 | 133 | 129 | 16 | K |
| CH1 | 134 | 130 | 17 | S |
| CH1 | 135 | 133 | 18 | T |
| CH1 | 136 | 134 | 19 | S |
| CH1 | 137 | 135 | 20 | G |
| CH1 | 138 | 136 | 21 | G |
| CH1 | 139 | 137 | 22 | T |
| CH1 | 140 | 138 | 23 | A |
| CH1 | 141 | 139 | 24 | A |
| CH1 | 142 | 140 | 25 | L |
| CH1 | 143 | 141 | 26 | G |
| CH1 | 144 | 142 | 27 | C |
| CH1 | 145 | 143 | 28 | L |
| CH1 | 146 | 144 | 29 | V |
| CH1 | 147 | 145 | 30 | K |
| CH1 | 148 | 146 | 31 | D |
| CH1 | 149 | 147 | 32 | Y |
| CH1 | 150 | 148 | 33 | F |
| CH1 | 151 | 149 | 34 | P |
| CH1 | 152 | 150 | 35 | E |
| CH1 | 153 | 151 | 36 | P |
| CH1 | 154 | 152 | 37 | V |
| CH1 | 155 | 153 | 38 | T |
| CH1 | 156 | 154 | 39 | V |
| CH1 | 157 | 156 | 40 | S |
| CH1 | 158 | 157 | 41 | W |
| CH1 | 159 | 162 | 42 | N |
| CH1 | 160 | 163 | 43 | S |
| CH1 | 161 | 164 | 44 | G |
| CH1 | 162 | 165 | 45 | A |
| CH1 | 163 | 166 | 46 | L |
| CH1 | 164 | 167 | 47 | T |
| CH1 | 165 | 168 | 48 | S |
| CH1 | 166 | 169 | 49 | G |
| CH1 | 167 | 171 | 50 | V |
| CH1 | 168 | 172 | 51 | H |
| CH1 | 169 | 173 | 52 | T |
| CH1 | 170 | 174 | 53 | F |
| CH1 | 171 | 175 | 54 | P |
| CH1 | 172 | 176 | 55 | A |
| CH1 | 173 | 177 | 56 | V |
| CH1 | 174 | 178 | 57 | L |
| CH1 | 175 | 179 | 58 | Q |
| CH1 | 176 | 180 | 59 | S |
| CH1 | 177 | 182 | 60 | S |
| CH1 | 178 | 183 | 61 | G |
| CH1 | 179 | 184 | 62 | L |
| CH1 | 180 | 185 | 63 | Y |
| CH1 | 181 | 186 | 64 | S |
| CH1 | 182 | 187 | 65 | L |
| CH1 | 183 | 188 | 66 | S |
| CH1 | 184 | 189 | 67 | S |
| CH1 | 185 | 190 | 68 | V |
| CH1 | 186 | 191 | 69 | V |
| CH1 | 187 | 192 | 70 | T |
| CH1 | 188 | 193 | 71 | V |
| CH1 | 189 | 194 | 72 | P |
| CH1 | 190 | 195 | 73 | S |
| CH1 | 191 | 196 | 74 | S |
| CH1 | 192 | 197 | 75 | S |
| CH1 | 193 | 198 | 76 | L |
| CH1 | 194 | 199 | 77 | G |
| CH1 | 195 | 200 | 78 | T |
| CH1 | 196 | 203 | 79 | Q |
| CH1 | 197 | 205 | 80 | T |
| CH1 | 198 | 206 | 81 | Y |
| CH1 | 199 | 207 | 82 | I |
| CH1 | 200 | 208 | 83 | C |
| CH1 | 201 | 209 | 84 | N |
| CH1 | 202 | 210 | 85 | V |
| CH1 | 203 | 211 | 86 | N |
| CH1 | 204 | 212 | 87 | H |
| CH1 | 205 | 213 | 88 | K |
| CH1 | 206 | 214 | 89 | P |
| CH1 | 207 | 215 | 90 | S |
| CH1 | 208 | 216 | 91 | N |
| CH1 | 209 | 217 | 92 | T |
| CH1 | 210 | 218 | 93 | K |
| CH1 | 211 | 219 | 94 | V |
| CH1 | 212 | 220 | 95 | D |
| CH1 | 213 | 221 | 96 | K |
| CH1 | 214 | 222 | 97 | K |
| CH1 | 215 | 223 | 98 | V |
| Hinge | 216 | 226 | 99 | E |
| Hinge | 217 | 227 | 100 | P |
| Hinge | 218 | 228 | 101 | K |
| Hinge | 219 | 232 | 102 | S |
| Hinge | 220 | 233 | 103 | C |
| Hinge | 221 | 234 | 104 | D |
| Hinge | 222 | 235 | 105 | K |
| Hinge | 223 | 236 | 106 | T |
| Hinge | 224 | 237 | 107 | H |
| Hinge | 225 | 238 | 108 | T |
| Hinge | 226 | 239 | 109 | C |
| Hinge | 227 | 240 | 110 | P |
| Hinge | 228 | 241 | 111 | P |
| Hinge | 229 | 242 | 112 | C |
| Hinge | 230 | 243 | 113 | P |
| CH2 | 231 | 244 | 114 | A |
| CH2 | 232 | 245 | 115 | P |
| CH2 | 233 | 246 | 116 | E |
| CH2 | 234 | 247 | 117 | L |
| CH2 | 235 | 248 | 118 | L |
| CH2 | 236 | 249 | 119 | G |
| CH2 | 237 | 250 | 120 | G |
| CH2 | 238 | 251 | 121 | P |
| CH2 | 239 | 252 | 122 | S |
| CH2 | 240 | 253 | 123 | V |
| CH2 | 241 | 254 | 124 | F |
| CH2 | 242 | 255 | 125 | L |
| CH2 | 243 | 256 | 126 | F |
| CH2 | 244 | 257 | 127 | P |
| CH2 | 245 | 258 | 128 | P |
| CH2 | 246 | 259 | 129 | K |
| CH2 | 247 | 260 | 130 | P |
| CH2 | 248 | 261 | 131 | K |
| CH2 | 249 | 262 | 132 | D |
| CH2 | 250 | 263 | 133 | T |
| CH2 | 251 | 264 | 134 | L |
| CH2 | 252 | 265 | 135 | M |
| CH2 | 253 | 266 | 136 | I |
| CH2 | 254 | 267 | 137 | S |
| CH2 | 255 | 268 | 138 | R |
| CH2 | 256 | 269 | 139 | T |
| CH2 | 257 | 270 | 140 | P |
| CH2 | 258 | 271 | 141 | E |
| CH2 | 259 | 272 | 142 | V |
| CH2 | 260 | 273 | 143 | T |
| CH2 | 261 | 274 | 144 | C |
| CH2 | 262 | 275 | 145 | V |
| CH2 | 263 | 276 | 146 | V |
| CH2 | 264 | 277 | 147 | V |
| CH2 | 265 | 278 | 148 | D |
| CH2 | 266 | 279 | 149 | V |
| CH2 | 267 | 280 | 150 | S |
| CH2 | 268 | 281 | 151 | H |
| CH2 | 269 | 282 | 152 | E |
| CH2 | 270 | 283 | 153 | D |
| CH2 | 271 | 284 | 154 | P |
| CH2 | 272 | 285 | 155 | E |
| CH2 | 273 | 286 | 156 | V |
| CH2 | 274 | 287 | 157 | K |
| CH2 | 275 | 288 | 158 | F |
| CH2 | 276 | 289 | 159 | N |
| CH2 | 277 | 290 | 160 | W |
| CH2 | 278 | 291 | 161 | Y |
| CH2 | 279 | 292 | 162 | V |
| CH2 | 280 | 295 | 163 | D |
| CH2 | 281 | 296 | 164 | G |
| CH2 | 282 | 299 | 165 | V |
| CH2 | 283 | 300 | 166 | E |
| CH2 | 284 | 301 | 167 | V |
| CH2 | 285 | 302 | 168 | H |
| CH2 | 286 | 303 | 169 | N |
| CH2 | 287 | 304 | 170 | A |
| CH2 | 288 | 305 | 171 | K |
| CH2 | 289 | 306 | 172 | T |
| CH2 | 290 | 307 | 173 | K |
| CH2 | 291 | 308 | 174 | P |
| CH2 | 292 | 309 | 175 | R |
| CH2 | 293 | 310 | 176 | E |
| CH2 | 294 | 311 | 177 | E |
| CH2 | 295 | 312 | 178 | Q |
| CH2 | 296 | 313 | 179 | Y |
| CH2 | 297 | 314 | 180 | N |
| CH2 | 298 | 317 | 181 | S |
| CH2 | 299 | 318 | 182 | T |
| CH2 | 300 | 319 | 183 | Y |
| CH2 | 301 | 320 | 184 | R |
| CH2 | 302 | 321 | 185 | V |
| CH2 | 303 | 322 | 186 | V |
| CH2 | 304 | 323 | 187 | S |
| CH2 | 305 | 324 | 188 | V |
| CH2 | 306 | 325 | 189 | L |
| CH2 | 307 | 326 | 190 | T |
| CH2 | 308 | 327 | 191 | V |
| CH2 | 309 | 328 | 192 | L |
| CH2 | 310 | 329 | 193 | H |
| CH2 | 311 | 330 | 194 | Q |
| CH2 | 312 | 331 | 195 | D |
| CH2 | 313 | 332 | 196 | W |
| CH2 | 314 | 333 | 197 | L |
| CH2 | 315 | 334 | 198 | N |
| CH2 | 316 | 335 | 199 | G |
| CH2 | 317 | 336 | 200 | K |
| CH2 | 318 | 337 | 201 | E |
| CH2 | 319 | 338 | 202 | Y |
| CH2 | 320 | 339 | 203 | K |
| CH2 | 321 | 340 | 204 | C |
| CH2 | 322 | 341 | 205 | K |
| CH2 | 323 | 342 | 206 | V |
| CH2 | 324 | 343 | 207 | S |
| CH2 | 325 | 344 | 208 | N |
| CH2 | 326 | 345 | 209 | K |
| CH2 | 327 | 346 | 210 | A |
| CH2 | 328 | 347 | 211 | L |
| CH2 | 329 | 348 | 212 | P |
| CH2 | 330 | 349 | 213 | A |
| CH2 | 331 | 350 | 214 | P |
| CH2 | 332 | 351 | 215 | I |
| CH2 | 333 | 352 | 216 | E |
| CH2 | 334 | 353 | 217 | K |
| CH2 | 335 | 354 | 218 | T |
| CH2 | 336 | 355 | 219 | I |
| CH2 | 337 | 357 | 220 | S |
| CH2 | 338 | 358 | 221 | K |
| CH2 | 339 | 359 | 222 | A |
| CH2 | 340 | 360 | 223 | K |
| CH3 | 341 | 361 | 224 | G |
| CH3 | 342 | 363 | 225 | Q |
| CH3 | 343 | 364 | 226 | P |
| CH3 | 344 | 365 | 227 | R |
| CH3 | 345 | 366 | 228 | E |
| CH3 | 346 | 367 | 229 | P |
| CH3 | 347 | 368 | 230 | Q |
| CH3 | 348 | 369 | 231 | V |
| CH3 | 349 | 370 | 232 | Y |
| CH3 | 350 | 371 | 233 | T |
| CH3 | 351 | 372 | 234 | L |
| CH3 | 352 | 373 | 235 | P |
| CH3 | 353 | 374 | 236 | P |
| CH3 | 354 | 375 | 237 | S |
| CH3 | 355 | 376 | 238 | R |
| CH3 | 356 | 377 | 239 | D |
| CH3 | 357 | 378 | 240 | E |
| CH3 | 358 | 381 | 241 | L |
| CH3 | 359 | 382 | 242 | T |
| CH3 | 360 | 383 | 243 | K |
| CH3 | 361 | 384 | 244 | N |
| CH3 | 362 | 385 | 245 | Q |
| CH3 | 363 | 386 | 246 | V |
| CH3 | 364 | 387 | 247 | S |
| CH3 | 365 | 388 | 248 | L |
| CH3 | 366 | 389 | 249 | T |
| CH3 | 367 | 390 | 250 | C |
| CH3 | 368 | 391 | 251 | L |
| CH3 | 369 | 392 | 252 | V |
| CH3 | 370 | 393 | 253 | K |
| CH3 | 371 | 394 | 254 | G |
| CH3 | 372 | 395 | 255 | F |
| CH3 | 373 | 396 | 256 | Y |
| CH3 | 374 | 397 | 257 | P |
| CH3 | 375 | 398 | 258 | S |
| CH3 | 376 | 399 | 259 | D |
| CH3 | 377 | 400 | 260 | I |
| CH3 | 378 | 401 | 261 | A |
| CH3 | 379 | 402 | 262 | V |
| CH3 | 380 | 405 | 263 | E |
| CH3 | 381 | 406 | 264 | W |
| CH3 | 382 | 407 | 265 | E |
| CH3 | 383 | 408 | 266 | S |
| CH3 | 384 | 410 | 267 | N |
| CH3 | 385 | 411 | 268 | G |
| CH3 | 386 | 414 | 269 | Q |
| CH3 | 387 | 415 | 270 | P |
| CH3 | 388 | 416 | 271 | E |
| CH3 | 389 | 417 | 272 | N |
| CH3 | 390 | 418 | 273 | N |
| CH3 | 391 | 419 | 274 | Y |
| CH3 | 392 | 420 | 275 | K |
| CH3 | 393 | 421 | 276 | T |
| CH3 | 394 | 422 | 277 | T |
| CH3 | 395 | 423 | 278 | P |
| CH3 | 396 | 424 | 279 | P |
| CH3 | 397 | 425 | 280 | V |
| CH3 | 398 | 426 | 281 | L |
| CH3 | 399 | 427 | 282 | D |
| CH3 | 400 | 428 | 283 | S |
| CH3 | 401 | 430 | 284 | D |
| CH3 | 402 | 433 | 285 | G |
| CH3 | 403 | 434 | 286 | S |
| CH3 | 404 | 435 | 287 | F |
| CH3 | 405 | 436 | 288 | F |
| CH3 | 406 | 437 | 289 | L |
| CH3 | 407 | 438 | 290 | Y |
| CH3 | 408 | 439 | 291 | S |
| CH3 | 409 | 440 | 292 | K |
| CH3 | 410 | 441 | 293 | L |
| CH3 | 411 | 442 | 294 | T |
| CH3 | 412 | 443 | 295 | V |
| CH3 | 413 | 444 | 296 | D |
| CH3 | 414 | 445 | 297 | K |
| CH3 | 415 | 446 | 298 | S |
| CH3 | 416 | 447 | 299 | R |
| CH3 | 417 | 448 | 300 | W |
| CH3 | 418 | 449 | 301 | Q |
| CH3 | 419 | 450 | 302 | Q |
| CH3 | 420 | 451 | 303 | G |
| CH3 | 421 | 452 | 304 | N |
| CH3 | 422 | 453 | 305 | V |
| CH3 | 423 | 454 | 306 | F |
| CH3 | 424 | 455 | 307 | S |
| CH3 | 425 | 456 | 308 | C |
| CH3 | 426 | 457 | 309 | S |
| CH3 | 427 | 458 | 310 | V |
| CH3 | 428 | 459 | 311 | M |
| CH3 | 429 | 460 | 312 | H |
| CH3 | 430 | 461 | 313 | E |
| CH3 | 431 | 462 | 314 | A |
| CH3 | 432 | 463 | 315 | L |
| CH3 | 433 | 464 | 316 | H |
| CH3 | 434 | 465 | 317 | N |
| CH3 | 435 | 466 | 318 | H |
| CH3 | 436 | 467 | 319 | Y |
| CH3 | 437 | 468 | 320 | T |
| CH3 | 438 | 469 | 321 | Q |
| CH3 | 439 | 470 | 322 | K |
| CH3 | 440 | 471 | 323 | S |
| CH3 | 441 | 472 | 324 | L |
| CH3 | 442 | 473 | 325 | S |
| CH3 | 443 | 474 | 326 | L |
| CH3 | 444 | 475 | 327 | S |
| CH3 | 445 | 476 | 328 | P |
| CH3 | 446 | 477 | 329 | G |
| CH3 | 447 | 478 | 330 | K |

TABLE 2
Kabat and EU Numbering of Ig Kappa Light Chain Constant Domain

| 1 | 2 | 3 | 4 | 5 | 6 | 7 | 8 | 9 | 10 | 11 | 12 | 13 | 14 | 15 |
|---|---|---|---|---|---|---|---|---|---|---|---|---|---|---|
| R | T | V | A | A | P | S | V | F | I | F | P | P | S | D |
| 108 | 109 | 110 | 111 | 112 | 113 | 114 | 115 | 116 | 117 | 118 | 119 | 120 | 121 | 122 |
| 108 | 109 | 110 | 111 | 112 | 113 | 114 | 115 | 116 | 117 | 118 | 119 | 120 | 121 | 122 |
| 16 | 17 | 18 | 19 | 20 | 21 | 22 | 23 | 24 | 25 | 26 | 27 | 28 | 29 | 30 |
| E | Q | L | K | S | G | T | A | S | V | V | C | L | L | N |
| 123 | 124 | 125 | 126 | 127 | 128 | 129 | 130 | 131 | 132 | 133 | 134 | 135 | 136 | 137 |
| 123 | 124 | 125 | 126 | 127 | 128 | 129 | 130 | 131 | 132 | 133 | 134 | 135 | 136 | 137 |
| 31 | 32 | 33 | 34 | 35 | 36 | 37 | 38 | 39 | 40 | 41 | 42 | 43 | 44 | 45 |
| N | F | Y | P | R | E | A | K | V | Q | W | K | V | D | N |
| 138 | 139 | 140 | 141 | 142 | 143 | 144 | 145 | 146 | 147 | 148 | 149 | 150 | 151 | 152 |
| 138 | 139 | 140 | 141 | 142 | 143 | 144 | 145 | 146 | 147 | 148 | 149 | 150 | 151 | 152 |
| 46 | 47 | 48 | 49 | 50 | 51 | 52 | 53 | 54 | 55 | 56 | 57 | 58 | 59 | 60 |
| A | L | Q | S | G | N | S | Q | E | S | V | T | E | Q | D |
| 153 | 154 | 155 | 156 | 157 | 158 | 159 | 160 | 161 | 162 | 163 | 164 | 165 | 166 | 167 |
| 153 | 154 | 155 | 156 | 157 | 158 | 159 | 160 | 161 | 162 | 163 | 164 | 165 | 166 | 167 |
| 61 | 62 | 63 | 64 | 65 | 66 | 67 | 68 | 69 | 70 | 71 | 72 | 73 | 74 | 75 |
| S | K | D | S | T | Y | S | L | S | S | T | L | T | L | S |
| 168 | 169 | 170 | 171 | 172 | 173 | 174 | 175 | 176 | 177 | 178 | 179 | 180 | 181 | 182 |
| 168 | 169 | 170 | 171 | 172 | 173 | 174 | 175 | 176 | 177 | 178 | 179 | 180 | 181 | 182 |
| 76 | 77 | 78 | 79 | 80 | 81 | 82 | 83 | 84 | 85 | 86 | 87 | 88 | 89 | 90 |
| K | A | D | Y | E | K | H | K | V | Y | A | C | E | V | T |
| 183 | 184 | 185 | 186 | 187 | 188 | 189 | 190 | 191 | 192 | 193 | 194 | 195 | 196 | 197 |
| 183 | 184 | 185 | 186 | 187 | 188 | 189 | 190 | 191 | 192 | 193 | 194 | 195 | 196 | 197 |
| 91 | 92 | 93 | 94 | 95 | 96 | 97 | 98 | 99 | 100 | 101 | 102 | 103 | 104 | 105 |
| H | Q | G | L | S | S | P | V | T | K | S | F | N | R | G |
| 198 | 199 | 200 | 201 | 202 | 203 | 204 | 205 | 206 | 207 | 208 | 209 | 210 | 211 | 212 |
| 198 | 199 | 200 | 201 | 202 | 203 | 204 | 205 | 206 | 207 | 208 | 209 | 210 | 211 | 212 |

| 106 | 107 |
|---|---|
| E | C |
| 213 | 214 |
| 213 | 214 |

TABLE 3
IgG4 Heavy Chain Constant Domain by
EU, Kabat and Sequential Numbering

Residue Numbering

| | EU | | Sequential | IgG4 |
|---|---|---|---|---|
| Domain | Index | Kabat | (SEQ ID NO: 15) | Sequence |
| CH1 | 118 | 114 | 1 | A |
| CH1 | 119 | 115 | 2 | S |
| CH1 | 120 | 116 | 3 | T |
| CH1 | 121 | 117 | 4 | K |
| CH1 | 122 | 118 | 5 | G |
| CH1 | 123 | 119 | 6 | P |
| CH1 | 124 | 120 | 7 | S |
| CH1 | 125 | 121 | 8 | V |
| CH1 | 126 | 122 | 9 | F |
| CH1 | 127 | 123 | 10 | P |
| CH1 | 128 | 124 | 11 | L |
| CH1 | 129 | 125 | 12 | A |
| CH1 | 130 | 126 | 13 | P |
| CH1 | 131 | 127 | 14 | C |
| CH1 | 132 | 128 | 15 | S |
| CH1 | 133 | 129 | 16 | R |
| CH1 | 134 | 130 | 17 | S |
| CH1 | 135 | 133 | 18 | T |
| CH1 | 136 | 134 | 19 | S |
| CH1 | 137 | 135 | 20 | E |
| CH1 | 138 | 136 | 21 | S |
| CH1 | 139 | 137 | 22 | T |
| CH1 | 140 | 138 | 23 | A |
| CH1 | 141 | 139 | 24 | A |
| CH1 | 142 | 140 | 25 | L |
| CH1 | 143 | 141 | 26 | G |
| CH1 | 144 | 142 | 27 | C |
| CH1 | 145 | 143 | 28 | L |
| CH1 | 146 | 144 | 29 | V |
| CH1 | 147 | 145 | 30 | K |
| CH1 | 148 | 146 | 31 | D |
| CH1 | 149 | 147 | 32 | Y |
| CH1 | 150 | 148 | 33 | F |
| CH1 | 151 | 149 | 34 | P |
| CH1 | 152 | 150 | 35 | E |
| CH1 | 153 | 151 | 36 | P |
| CH1 | 154 | 152 | 37 | V |
| CH1 | 155 | 153 | 38 | T |
| CH1 | 156 | 154 | 39 | V |
| CH1 | 157 | 156 | 40 | S |
| CH1 | 158 | 157 | 41 | W |
| CH1 | 159 | 162 | 42 | N |
| CH1 | 160 | 163 | 43 | S |
| CH1 | 161 | 164 | 44 | G |
| CH1 | 162 | 165 | 45 | A |
| CH1 | 163 | 166 | 46 | L |
| CH1 | 164 | 167 | 47 | T |
| CH1 | 165 | 168 | 48 | S |
| CH1 | 166 | 169 | 49 | G |
| CH1 | 167 | 171 | 50 | V |
| CH1 | 168 | 172 | 51 | H |
| CH1 | 169 | 173 | 52 | T |
| CH1 | 170 | 174 | 53 | F |
| CH1 | 171 | 175 | 54 | P |
| CH1 | 172 | 176 | 55 | A |
| CH1 | 173 | 177 | 56 | V |
| CH1 | 174 | 178 | 57 | L |
| CH1 | 175 | 179 | 58 | Q |
| CH1 | 176 | 180 | 59 | S |
| CH1 | 177 | 182 | 60 | S |
| CH1 | 178 | 183 | 61 | G |
| CH1 | 179 | 184 | 62 | L |
| CH1 | 180 | 185 | 63 | Y |
| CH1 | 181 | 186 | 64 | S |
| CH1 | 182 | 187 | 65 | L |
| CH1 | 183 | 188 | 66 | S |
| CH1 | 184 | 189 | 67 | S |
| CH1 | 185 | 190 | 68 | V |
| CH1 | 186 | 191 | 69 | V |
| CH1 | 187 | 192 | 70 | T |
| CH1 | 188 | 193 | 71 | V |
| CH1 | 189 | 194 | 72 | P |
| CH1 | 190 | 195 | 73 | S |
| CH1 | 191 | 196 | 74 | S |
| CH1 | 192 | 197 | 75 | S |
| CH1 | 193 | 198 | 76 | L |
| CH1 | 194 | 199 | 77 | G |
| CH1 | 195 | 200 | 78 | T |
| CH1 | 196 | 203 | 79 | K |
| CH1 | 197 | 205 | 80 | T |
| CH1 | 198 | 206 | 81 | Y |
| CH1 | 199 | 207 | 82 | T |
| CH1 | 200 | 208 | 83 | C |
| CH1 | 201 | 209 | 84 | N |
| CH1 | 202 | 210 | 85 | V |
| CH1 | 203 | 211 | 86 | D |
| CH1 | 204 | 212 | 87 | H |
| CH1 | 205 | 213 | 88 | K |
| CH1 | 206 | 214 | 89 | P |
| CH1 | 207 | 215 | 90 | S |
| CH1 | 208 | 216 | 91 | N |
| CH1 | 209 | 217 | 92 | T |
| CH1 | 210 | 218 | 93 | K |
| CH1 | 211 | 219 | 94 | V |
| CH1 | 212 | 220 | 95 | D |
| CH1 | 213 | 221 | 96 | K |
| CH1 | 214 | 222 | 97 | R |
| CH1 | 215 | 223 | 98 | V |
| Hinge | 216 | 226 | 99 | E |
| Hinge | 217 | 227 | 100 | S |
| Hinge | 218 | 228 | 101 | K |
| Hinge | 219 | 229 | 102 | Y |
| Hinge | 220 | 230 | 103 | G |
| Hinge | 224 | 237 | 104 | P |
| Hinge | 225 | 238 | 105 | P |
| Hinge | 226 | 239 | 106 | C |
| Hinge | 227 | 240 | 107 | P |
| Hinge | 228 | 241 | 108 | S |
| Hinge | 229 | 242 | 109 | C |
| Hinge | 230 | 243 | 110 | P |
| CH2 | 231 | 244 | 111 | A |
| CH2 | 232 | 245 | 112 | P |
| CH2 | 233 | 246 | 113 | E |
| CH2 | 234 | 247 | 114 | F |
| CH2 | 235 | 248 | 115 | L |
| CH2 | 236 | 249 | 116 | G |
| CH2 | 237 | 250 | 117 | G |
| CH2 | 238 | 251 | 118 | P |
| CH2 | 239 | 252 | 119 | S |
| CH2 | 240 | 253 | 120 | V |
| CH2 | 241 | 254 | 121 | F |
| CH2 | 242 | 255 | 122 | L |
| CH2 | 243 | 256 | 123 | F |
| CH2 | 244 | 257 | 124 | P |
| CH2 | 245 | 258 | 125 | P |
| CH2 | 246 | 259 | 126 | K |
| CH2 | 247 | 260 | 127 | P |
| CH2 | 248 | 261 | 128 | K |
| CH2 | 249 | 262 | 129 | D |
| CH2 | 250 | 263 | 130 | T |
| CH2 | 251 | 264 | 131 | L |
| CH2 | 252 | 265 | 132 | M |
| CH2 | 253 | 266 | 133 | I |
| CH2 | 254 | 267 | 134 | S |
| CH2 | 255 | 268 | 135 | R |
| CH2 | 256 | 269 | 136 | T |
| CH2 | 257 | 270 | 137 | P |
| CH2 | 258 | 271 | 138 | E |
| CH2 | 259 | 272 | 139 | V |
| CH2 | 260 | 273 | 140 | T |
| CH2 | 261 | 274 | 141 | C |
| CH2 | 262 | 275 | 142 | V |
| CH2 | 263 | 276 | 143 | V |
| CH2 | 264 | 277 | 144 | V |
| CH2 | 265 | 278 | 145 | D |
| CH2 | 266 | 279 | 146 | V |
| CH2 | 267 | 280 | 147 | S |
| CH2 | 268 | 281 | 148 | Q |
| CH2 | 269 | 282 | 149 | E |
| CH2 | 270 | 283 | 150 | D |
| CH2 | 271 | 284 | 151 | P |
| CH2 | 272 | 285 | 152 | E |
| CH2 | 273 | 286 | 153 | V |
| CH2 | 274 | 287 | 154 | Q |
| CH2 | 275 | 288 | 155 | F |
| CH2 | 276 | 289 | 156 | N |
| CH2 | 277 | 290 | 157 | W |
| CH2 | 278 | 291 | 158 | Y |
| CH2 | 279 | 292 | 159 | V |
| CH2 | 280 | 295 | 160 | D |
| CH2 | 281 | 296 | 161 | G |
| CH2 | 282 | 299 | 162 | V |
| CH2 | 283 | 300 | 163 | E |
| CH2 | 284 | 301 | 164 | V |
| CH2 | 285 | 302 | 165 | H |
| CH2 | 286 | 303 | 166 | N |
| CH2 | 287 | 304 | 167 | A |
| CH2 | 288 | 305 | 168 | K |
| CH2 | 289 | 306 | 169 | T |
| CH2 | 290 | 307 | 170 | K |
| CH2 | 291 | 308 | 171 | P |
| CH2 | 292 | 309 | 172 | R |
| CH2 | 293 | 310 | 173 | E |
| CH2 | 294 | 311 | 174 | E |
| CH2 | 295 | 312 | 175 | Q |
| CH2 | 296 | 313 | 176 | F |
| CH2 | 297 | 314 | 177 | N |
| CH2 | 298 | 317 | 178 | S |
| CH2 | 299 | 318 | 179 | T |
| CH2 | 300 | 319 | 180 | Y |
| CH2 | 301 | 320 | 181 | R |
| CH2 | 302 | 321 | 182 | V |
| CH2 | 303 | 322 | 183 | V |
| CH2 | 304 | 323 | 184 | S |
| CH2 | 305 | 324 | 185 | V |
| CH2 | 306 | 325 | 186 | L |
| CH2 | 307 | 326 | 187 | T |
| CH2 | 308 | 327 | 188 | V |
| CH2 | 309 | 328 | 189 | L |
| CH2 | 310 | 329 | 190 | H |
| CH2 | 311 | 330 | 191 | Q |
| CH2 | 312 | 331 | 192 | D |
| CH2 | 313 | 332 | 193 | W |
| CH2 | 314 | 333 | 194 | L |
| CH2 | 315 | 334 | 195 | N |
| CH2 | 316 | 335 | 196 | G |
| CH2 | 317 | 336 | 197 | K |
| CH2 | 318 | 337 | 198 | E |
| CH2 | 319 | 338 | 199 | Y |
| CH2 | 320 | 339 | 200 | K |
| CH2 | 321 | 340 | 201 | C |
| CH2 | 322 | 341 | 202 | K |
| CH2 | 323 | 342 | 203 | V |
| CH2 | 324 | 343 | 204 | S |
| CH2 | 325 | 344 | 205 | N |
| CH2 | 326 | 345 | 206 | K |
| CH2 | 327 | 346 | 207 | G |
| CH2 | 328 | 347 | 208 | L |
| CH2 | 329 | 348 | 209 | P |
| CH2 | 330 | 349 | 210 | S |
| CH2 | 331 | 350 | 211 | S |
| CH2 | 332 | 351 | 212 | I |
| CH2 | 333 | 352 | 213 | E |
| CH2 | 334 | 353 | 214 | K |
| CH2 | 335 | 354 | 215 | T |
| CH2 | 336 | 355 | 216 | I |
| CH2 | 337 | 357 | 217 | S |
| CH2 | 338 | 358 | 218 | K |
| CH2 | 339 | 359 | 219 | A |
| CH2 | 340 | 360 | 220 | K |
| CH3 | 341 | 361 | 221 | G |
| CH3 | 342 | 363 | 222 | Q |
| CH3 | 343 | 364 | 223 | P |
| CH3 | 344 | 365 | 224 | R |
| CH3 | 345 | 366 | 225 | E |
| CH3 | 346 | 367 | 226 | P |
| CH3 | 347 | 368 | 227 | Q |
| CH3 | 348 | 369 | 228 | V |
| CH3 | 349 | 370 | 229 | Y |
| CH3 | 350 | 371 | 230 | T |
| CH3 | 351 | 372 | 231 | L |
| CH3 | 352 | 373 | 232 | P |
| CH3 | 353 | 374 | 233 | P |
| CH3 | 354 | 375 | 234 | S |
| CH3 | 355 | 376 | 235 | Q |
| CH3 | 356 | 377 | 236 | E |
| CH3 | 357 | 378 | 237 | E |
| CH3 | 358 | 381 | 238 | M |
| CH3 | 359 | 382 | 239 | T |
| CH3 | 360 | 383 | 240 | K |
| CH3 | 361 | 384 | 241 | N |
| CH3 | 362 | 385 | 242 | Q |
| CH3 | 363 | 386 | 243 | V |
| CH3 | 364 | 387 | 244 | S |
| CH3 | 365 | 388 | 245 | L |
| CH3 | 366 | 389 | 246 | T |
| CH3 | 367 | 390 | 247 | C |
| CH3 | 368 | 391 | 248 | L |
| CH3 | 369 | 392 | 249 | V |
| CH3 | 370 | 393 | 250 | K |
| CH3 | 371 | 394 | 251 | G |
| CH3 | 372 | 395 | 252 | F |
| CH3 | 373 | 396 | 253 | Y |
| CH3 | 374 | 397 | 254 | P |
| CH3 | 375 | 398 | 255 | S |
| CH3 | 376 | 399 | 256 | D |
| CH3 | 377 | 400 | 257 | I |
| CH3 | 378 | 401 | 258 | A |
| CH3 | 379 | 402 | 259 | V |
| CH3 | 380 | 405 | 260 | E |
| CH3 | 381 | 406 | 261 | W |
| CH3 | 382 | 407 | 262 | E |
| CH3 | 383 | 408 | 263 | S |
| CH3 | 384 | 410 | 264 | N |
| CH3 | 385 | 411 | 265 | G |
| CH3 | 386 | 414 | 266 | Q |
| CH3 | 387 | 415 | 267 | P |
| CH3 | 388 | 416 | 268 | E |
| CH3 | 389 | 417 | 269 | N |
| CH3 | 390 | 418 | 270 | N |
| CH3 | 391 | 419 | 271 | Y |
| CH3 | 392 | 420 | 272 | K |
| CH3 | 393 | 421 | 273 | T |
| CH3 | 394 | 422 | 274 | T |
| CH3 | 395 | 423 | 275 | P |
| CH3 | 396 | 424 | 276 | P |
| CH3 | 397 | 425 | 277 | V |
| CH3 | 398 | 426 | 278 | L |
| CH3 | 399 | 427 | 279 | D |
| CH3 | 400 | 428 | 280 | S |
| CH3 | 401 | 430 | 281 | D |
| CH3 | 402 | 433 | 282 | G |
| CH3 | 403 | 434 | 283 | S |
| CH3 | 404 | 435 | 284 | F |
| CH3 | 405 | 436 | 285 | F |
| CH3 | 406 | 437 | 286 | L |
| CH3 | 407 | 438 | 287 | Y |
| CH3 | 408 | 439 | 288 | S |
| CH3 | 409 | 440 | 289 | R |
| CH3 | 410 | 441 | 290 | L |
| CH3 | 411 | 442 | 291 | T |
| CH3 | 412 | 443 | 292 | V |
| CH3 | 413 | 444 | 293 | D |
| CH3 | 414 | 445 | 294 | K |
| CH3 | 415 | 446 | 295 | S |
| CH3 | 416 | 447 | 296 | R |
| CH3 | 417 | 448 | 297 | W |
| CH3 | 418 | 449 | 298 | Q |
| CH3 | 419 | 450 | 299 | E |
| CH3 | 420 | 451 | 300 | G |
| CH3 | 421 | 452 | 301 | N |
| CH3 | 422 | 453 | 302 | V |
| CH3 | 423 | 454 | 303 | F |
| CH3 | 424 | 455 | 304 | S |
| CH3 | 425 | 456 | 305 | C |
| CH3 | 426 | 457 | 306 | S |
| CH3 | 427 | 458 | 307 | V |
| CH3 | 428 | 459 | 308 | M |
| CH3 | 429 | 460 | 309 | H |
| CH3 | 430 | 461 | 310 | E |
| CH3 | 431 | 462 | 311 | A |
| CH3 | 432 | 463 | 312 | L |
| CH3 | 433 | 464 | 313 | H |
| CH3 | 434 | 465 | 314 | N |
| CH3 | 435 | 466 | 315 | H |
| CH3 | 436 | 467 | 316 | Y |
| CH3 | 437 | 468 | 317 | T |
| CH3 | 438 | 469 | 318 | Q |
| CH3 | 439 | 470 | 319 | K |
| CH3 | 440 | 471 | 320 | S |
| CH3 | 441 | 472 | 321 | L |
| CH3 | 442 | 473 | 322 | S |
| CH3 | 443 | 474 | 323 | L |
| CH3 | 444 | 475 | 324 | S |
| CH3 | 445 | 476 | 325 | L |
| CH3 | 446 | 477 | 326 | G |
| CH3 | 447 | 478 | 327 | K |

[0477] As used herein, the phrase “derived from,” when referring to antibody fragments derived from another antibody, such as a monoclonal antibody, refers to the engineering of antibody fragments (e.g., Fab, F(ab′), F(ab′)₂, single-chain Fv (scFv), Fv, dsFv, dAb, diabody, Fd and Fd′ fragments) that retain the binding specificity of the original antibody. Such fragments can be derived by a variety of methods known in the art, including, but not limited to, enzymatic cleavage, chemical crosslinking, recombinant means, or combinations thereof. Generally, the derived antibody fragment shares the identical, or substantially identical, heavy chain variable region (V_{H}) and light chain variable region (V_{L}) of the parent antibody, such that the antibody fragment and the parent antibody bind the same epitope.

[0478] As used herein, a “parent antibody” or “source antibody” refers to an antibody from which an antibody fragment (e.g., Fab, F(ab′), F(ab)₂, single-chain Fv (scFv), Fv, dsFv, dAb, diabody, Fd and Fd′ fragments) is derived.

[0479] As used herein, the term “epitope” refers to any antigenic determinant on an antigen or protein, to which the paratope of an antibody can bind. Epitopic determinants typically contain chemically active surface groupings of molecules, such as amino acids or sugar side chains, and typically have specific three-dimensional structural characteristics, as well as specific charge characteristics.

[0480] As used herein, “humanized antibodies” and human therapeutics refer to antibodies and other protein therapeutics that are modified to include “human” sequences of amino acids, so that administration to a human does not provoke an immune response. A humanized antibody, for example, typically contains complementarity determining regions (CDRs or hypervariable loops) derived from a non-human species immunoglobulin, and the remainder of the antibody molecule derived mainly from a human immunoglobulin. Methods for humanizing proteins, including antibodies, and producing them are well known and readily available to those of skill in the art. For example, DNA encoding a monoclonal antibody can be altered by recombinant DNA techniques to encode an antibody in which the amino acid composition of the non-variable regions is based on human antibodies. Methods for identifying such regions are known, including computer programs, which are designed for identifying the variable and non-variable regions of immunoglobulins. Hence, in general, the humanized antibody contains substantially all of at least one, and typically two, variable domains, in which all or substantially all of the hypervariable loops (e.g., CDRs) correspond to those of a non-human immunoglobulin, and all or substantially all of the framework regions (FRs) are those of a human immunoglobulin sequence. The humanized antibody, optionally, also contains at least a portion of an immunoglobulin constant region (Fc), typically that of a human immunoglobulin.

[0481] As used herein, a “multimerization domain” refers to a sequence of amino acids that promotes stable interaction of a polypeptide molecule with one or more additional polypeptide molecules, each containing a complementary multimerization domain, which can be the same or a different multimerization domain, to form a stable multimer with the first domain. Generally, a polypeptide is joined directly or indirectly to the multimerization domain. Exemplary multimerization domains include the immunoglobulin sequences or portions thereof, leucine zippers, hydrophobic regions, hydrophilic regions, and compatible protein-protein interaction domains. The multimerization domain, for example, can be an immunoglobulin constant region or domain, such as, for example, the Fc domain or portions thereof from IgG, including IgG1, IgG2, IgG3 or IgG4 subtypes, IgA, IgE, IgD and IgM, and modified forms thereof.

[0482] As used herein, “dimerization domains” are multimerization domains that facilitate interaction between two polypeptide sequences (such as, but not limited to, antibody chains). Dimerization domains include, but are not limited to, an amino acid sequence containing a cysteine residue that facilitates the formation of a disulfide bond between two polypeptide sequences, such as all or a part of a full-length antibody hinge region, or one or more dimerization sequences, which are sequences of amino acids known to promote interaction between polypeptides (e.g., leucine zippers, GCN4 zippers).

[0483] As used herein, a “chimeric polypeptide” refers to a polypeptide that contains portions from at least two different polypeptides or from two non-contiguous portions of a single polypeptide. Thus, a chimeric polypeptide generally includes a sequence of amino acid residues from all or a part of one polypeptide, and a sequence of amino acids from all or a part of another different polypeptide. The two portions can be linked directly or indirectly and can be linked via peptide bonds, other covalent bonds, or other non-covalent interactions of sufficient strength to maintain the integrity of a substantial portion of the chimeric polypeptide under equilibrium conditions and physiologic conditions, such as in isotonic pH 7 buffered saline.

[0484] As used herein, a “fusion protein” is a polypeptide engineered to contain sequences of amino acids corresponding to two distinct polypeptides, which are joined together, such as by expressing the fusion protein from a vector containing two nucleic acids, encoding the two polypeptides, in close proximity, e.g., adjacent, to one another along the length of the vector. Accordingly, a fusion protein refers to a chimeric protein containing two, or portions from two, or more proteins or peptides that are linked directly or indirectly via peptide bonds. The two molecules can be adjacent in the construct, or can be separated by a linker, or spacer polypeptide.

[0485] As used herein, a “linker,” “linker unit,” or “link,” refers to a peptide or chemical moiety containing a chain of atoms that covalently attaches an antibody or antigen-binding fragment thereof to another therapeutic moiety or another antibody or fragment thereof. Linkers are included, for example, to increase flexibility, modify steric effects, including steric hindrance, and increase solubility in aqueous medium.

[0486] As used herein, a “linker peptide” or “spacer peptide” refers to short sequences of amino acids that join two polypeptide sequences (or nucleic acids encoding such as an amino acid sequence). “Peptide linker” refers to the short sequence of amino acids joining the two polypeptide sequences. Exemplary of polypeptide linkers are linkers joining a peptide transduction domain to an antibody, or linkers joining two antibody chains in a synthetic antibody fragment, such as an scFv fragment. Linkers are well-known, and any known linkers can be used in the provided methods. Exemplary polypeptide linkers include (Gly-Ser)ₙ amino acid sequences, with some Glu or Lys residues dispersed throughout to increase solubility. Other exemplary linkers are described herein; any of these and other known linkers can be used with the polypeptides, antibodies, and other products and methods provided herein.

[0487] As used herein, a “tag” or an “epitope tag” refers to a sequence of amino acids, typically added to the N- or C-terminus of a polypeptide, such as an antibody and an antibody fragment/construct, provided herein. The inclusion of tags fused to a polypeptide can facilitate polypeptide purification and/or detection. Typically, a tag or tag polypeptide refers to a polypeptide that has enough residues to provide an epitope recognized by an antibody, or that can serve for detection or purification, yet is short enough such that it does not interfere with activity of the polypeptide to which it is linked. The tag polypeptide typically is sufficiently unique so that an antibody that specifically binds thereto does not substantially cross-react with epitopes in the polypeptide to which it is linked. Suitable tag polypeptides generally have at least 5 or 6 amino acid residues, and usually between about 8-50 amino acid residues, typically between 9-30 residues. The tags can be linked to one or more chimeric polypeptides in a multimer and permit detection of the multimer or its recovery from a sample or mixture. Such tags are well-known and can be readily synthesized and designed.

[0488] Exemplary tag polypeptides include those used for affinity purification and include, for example, FLAG tags; His tags; the influenza hemagglutinin (HA) tag polypeptide and its antibody 12CA5 (see, e.g., Field et al. (1988) Mol. Cell. Biol. 8:2159-2165); the c-myc tag and the 8F9, 3C7, 6E10, G4, B7 and 9E10 antibodies thereto (see, e.g., Evan et al. (1985) Molecular and Cellular Biology 5:3610-3616); and the Herpes Simplex virus glycoprotein D (gD) tag and its antibody (see, e.g., Paborsky et al. (1990) Protein Engineering 3:547-553). An antibody used to detect an epitope-tagged antibody is typically referred to herein as a secondary antibody.

[0489] As used herein, a “label” or “detectable moiety” is a detectable marker (e.g., a fluorescent molecule, chemiluminescent molecule, bioluminescent molecule, contrast agent (e.g., a metal), radionuclide, chromophore, detectable peptide, or an enzyme that catalyzes the formation of a detectable product) that can be attached or linked directly or indirectly to a molecule (e.g., an antibody or antigen-binding fragment thereof, such as an anti-TNFR1 antibody or antigen-binding fragment thereof provided herein), or associated therewith, and can be detected in vivo and/or in vitro. The detection method can be any method known in the art, including known in vivo and/or in vitro methods of detection (e.g., imaging by visual inspection, magnetic resonance (MR) spectroscopy, ultrasound signal, X-ray, gamma ray spectroscopy (e.g., positron emission tomography (PET) scanning, single-photon emission computed tomography (SPECT)), fluorescence spectroscopy, or absorption). Indirect detection refers to measurement of a physical phenomenon, such as energy or particle emission or absorption, of an atom, molecule or composition that binds directly or indirectly to the detectable moiety (e.g., detection of a labeled secondary antibody or antigen-binding fragment thereof that binds to a primary antibody (e.g., an anti-TNFR antibody or antigen-binding fragment thereof provided herein)).

[0490] As used herein, “nucleic acid” refers to at least two linked nucleotides or nucleotide derivatives, including a deoxyribonucleic acid (DNA) and a ribonucleic acid (RNA), joined together, typically by phosphodiester linkages. Also included in the term “nucleic acid” are analogs of nucleic acids, such as peptide nucleic acid (PNA), phosphorothioate DNA, and other such analogs and derivatives or combinations thereof. Nucleic acids also include DNA and RNA derivatives containing, for example, a nucleotide analog or a “backbone” bond other than a phosphodiester bond, for example, a phosphotriester bond, a phosphoramidate bond, a phosphorothioate bond, a thioester bond, or a peptide bond (i.e., peptide nucleic acid). The term also includes, as equivalents, derivatives, variants and analogs of either RNA or DNA made from nucleotide analogs, single (sense or antisense) and double-stranded nucleic acids. Deoxyribonucleotides include deoxyadenosine, deoxycytidine, deoxyguanosine and deoxythymidine. For RNA, the uracil base is uridine.

[0491] As used herein, an “isolated nucleic acid molecule” is one which is separated from other nucleic acid molecules which are present in the natural source of the nucleic acid molecule. An “isolated” nucleic acid molecule, such as a cDNA molecule, can be substantially free of other cellular material, or culture medium, when produced by recombinant techniques, or substantially free of chemical precursors or other chemicals, when chemically synthesized. Exemplary isolated nucleic acid molecules provided herein include isolated nucleic acid molecules encoding an antibody or antigen-binding fragments provided.

[0492] As used herein, “operably linked,” with reference to nucleic acid sequences, regions, elements or domains, means that the nucleic acid regions are functionally related to each other. For example, nucleic acid encoding a leader peptide can be operably linked to nucleic acid encoding a polypeptide, whereby the nucleic acids can be transcribed and translated to express a functional fusion protein, wherein the leader peptide effects secretion of the fusion polypeptide. In some instances, the nucleic acid encoding a first polypeptide (e.g., a leader peptide) is operably linked to nucleic acid encoding a second polypeptide, and the nucleic acids are transcribed as a single mRNA transcript, but translation of the mRNA transcript can result in one of two polypeptides being expressed. For example, an amber stop codon can be located between the nucleic acid encoding the first polypeptide and the nucleic acid encoding the second polypeptide, such that, when introduced into a partial amber suppressor cell, the resulting single mRNA transcript can be translated to produce either a fusion protein containing the first and second polypeptides, or can be translated to produce only the first polypeptide. In another example, a promoter can be operably linked to nucleic acid encoding a polypeptide, whereby the promoter regulates or mediates the transcription of the nucleic acid.

[0493] As used herein, “synthetic,” with reference to, for example, a synthetic nucleic acid molecule or a synthetic gene or a synthetic peptide, refers to a nucleic acid molecule or gene or polypeptide molecule that is produced by recombinant methods and/or by chemical synthesis methods.

[0494] As used herein, the residues of naturally occurring a-amino acids are the residues of those 20 α-amino acids found in nature which are incorporated into a protein by the specific recognition of the charged tRNA molecule with its cognate mRNA codon in humans.

[0495] As used herein, “polypeptide” refers to two or more amino acids covalently joined. The terms “polypeptide” and “protein” are used interchangeably herein.

[0496] As used herein, a “peptide” refers to a polypeptide that is from 2 to about or 40 amino acids in length.

[0497] As used herein, an “amino acid” is an organic compound containing an amino group and a carboxylic acid group. A polypeptide contains two or more amino acids.

[0498] For purposes herein, amino acids in the polypeptides, such as antibodies, provided include the twenty naturally-occurring amino acids (Table 4), non-natural amino acids, and amino acid analogs (e.g., amino acids wherein the α-carbon has a side chain). As used herein, the amino acids, which occur in the various amino acid sequences of polypeptides appearing herein, are identified according to their well-known, three-letter or one-letter abbreviations (see, Table 4). The nucleotides, which occur in the various nucleic acid molecules and fragments, are designated with the standard single-letter designations used routinely in the art.

[0499] As used herein, “amino acid residue” refers to an amino acid formed upon chemical digestion (hydrolysis) of a polypeptide at its peptide linkages. The amino acid residues described herein are generally in the “L” isomeric form. Residues in the “D” isomeric form can be substituted for any L-amino acid residue, as long as the desired functional property is retained by the polypeptide. NH₂ refers to the free amino group present at the amino terminus of a polypeptide. COOH refers to the free carboxy group present at the carboxyl terminus of a polypeptide. In keeping with standard polypeptide nomenclature described in J. Biol. Chem., 243:3557-59 (1968), and adopted at 37 C.F.R. §§ 1.821-1.822, abbreviations for amino acid residues are shown in Table 4:

TABLE 4
Table of Correspondence

| SYMBOL | | |
|---|---|---|
| 1-Letter | 3-Letter | AMINO ACID |
| Y | Tyr | Tyrosine |
| G | Gly | Glycine |
| F | Phe | Phenylalanine |
| M | Met | Methionine |
| A | Ala | Alanine |
| S | Ser | Serine |
| I | Ile | Isoleucine |
| L | Leu | Leucine |
| T | Thr | Threonine |
| V | Val | Valine |
| P | Pro | Proline |
| K | Lys | Lysine |
| H | His | Histidine |
| Q | Gln | Glutamine |
| E | Glu | Glutamic acid |
| Z | Glx | Glutamic Acid and/or Glutamine |
| W | Trp | Tryptophan |
| R | Arg | Arginine |
| D | Asp | Aspartic acid |
| N | Asn | Asparagine |
| B | Asx | Aspartic Acid and/or Asparagine |
| C | Cys | Cysteine |
| X | Xaa | Unknown or other |

[0500] All sequences of amino acid residues represented herein by a formula have a left to right orientation in the conventional direction of amino-terminus to carboxyl-terminus. In addition, the phrase “amino acid residue” is defined to include the amino acids listed in the Table of Correspondence (Table 4), modified, non-natural and unusual amino acids. Furthermore, a dash at the beginning or end of an amino acid residue sequence indicates a peptide bond to a further sequence of one or more amino acid residues, or to an amino-terminal group, such as NH₂, or to a carboxyl-terminal group, such as COOH. In a peptide or protein, suitable conservative substitutions of amino acids are known to those of skill in the art and generally can be made without altering a biological activity of a resulting molecule. Those of skill in the art recognize that, in general, single amino acid substitutions in non-essential regions of a polypeptide do not substantially alter biological activity (see, e.g., Watson et al., Molecular Biology of the Gene, 4th Edition, 1987, The Benjamin/Cummings Pub. Co., p. 224).

[0501] Such substitutions can be made in accordance with the exemplary substitutions set forth in Table 5 as follows:

TABLE 5
Exemplary Conservative Amino Acid Substitutions

| Original Residue | Conservative Substitution |
|---|---|
| Ala (A) | Gly; Ser |
| Arg (R) | Lys |
| Asn (N) | Gln; His |
| Cys (C) | Ser |
| Gln (Q) | Asn |
| Glu (E) | Asp |
| Gly (G) | Ala; Pro |
| His (H) | Asn; Gln |
| Ile (I) | Leu; Val |
| Leu (L) | Ile; Val |
| Lys (K) | Arg; Gln; Glu |
| Met (M) | Leu; Tyr; Ile |
| Phe (F) | Met; Leu; Tyr |
| Ser (S) | Thr |
| Thr (T) | Ser |
| Trp (W) | Tyr |
| Tyr (Y) | Trp; Phe |
| Val (V) | Ile; Leu |

[0502] Other substitutions also are permissible and can be determined empirically or in accord with other known conservative or non-conservative substitutions.

[0503] As used herein, “naturally occurring amino acids” refer to the 20 L-amino acids that occur in polypeptides.

[0504] As used herein, the term “non-natural amino acid” refers to an organic compound that has a structure similar to a natural amino acid but has been modified structurally to mimic the structure and reactivity of a natural amino acid. Non-naturally occurring amino acids thus include, for example, amino acids or analogs of amino acids other than the 20 naturally occurring amino acids and include, but are not limited to, the D-stereoisomers of amino acids. Exemplary non-natural amino acids are known to those of skill in the art, and include, but are not limited to, 2-Aminoadipic acid (Aad), 3-Aminoadipic acid (bAad), β-alanine/β-Amino-propionic acid (Bala), 2-Aminobutyric acid (Abu), 4-Aminobutyric acid/piperidinic acid (4Abu), 6-Aminocaproic acid (Acp), 2-Aminoheptanoic acid (Ahe), 2-Aminoisobutyric acid (Aib), 3-Aminoisobutyric acid (Baib), 2-Aminopimelic acid (Apm), 2,4-Diaminobutyric acid (Dbu), Desmosine (Des), 2,2′-Diaminopimelic acid (Dpm), 2,3-Diaminopropionic acid (Dpr), N-Ethylglycine (EtGly), N-Ethylasparagine (EtAsn), Hydroxylysine (Hyl), allo-Hydroxylysine (Ahyl), 3-Hydroxyproline (3Hyp), 4-Hydroxyproline (4Hyp), Isodesmosine (Ide), allo-Isoleucine (Aile), N-Methylglycine, sarcosine (MeGly), N-Methylisoleucine (MeIle), 6-N-Methyllysine (MeLys), N-Methylvaline (MeVal), Norvaline (Nva), Norleucine (Nle), and Ornithine (Orn).

[0505] As used herein, a “DNA construct” is a single- or double-stranded, linear or circular DNA molecule that contains segments of DNA combined and juxtaposed in a manner not found in nature. DNA constructs exist as a result of human manipulation, and include clones and other copies of manipulated molecules.

[0506] As used herein, a “DNA segment” is a portion of a larger DNA molecule having specified attributes. For example, a DNA segment encoding a specified polypeptide is a portion of a longer DNA molecule, such as a plasmid or plasmid fragment, which, when read from the 5′ to 3′ direction, encodes the sequence of amino acids of the specified polypeptide.

[0507] As used herein, the term “polynucleotide” means a single- or double-stranded polymer of deoxyribonucleotides or ribonucleotide bases read from the 5′ to the 3′ end. Polynucleotides include RNA and DNA, and can be isolated from natural sources, synthesized in vitro, or prepared from a combination of natural and synthetic molecules. The length of a polynucleotide molecule is given herein in terms of nucleotides (abbreviated “nt”) or base pairs (abbreviated “bp”). The term nucleotides is used for single- and double-stranded molecules where the context permits. When the term is applied to double-stranded molecules, it is used to denote overall length and is understood to be equivalent to the term base pairs. It will be recognized by those skilled in the art that the two strands of a double-stranded polynucleotide can differ slightly in length and that the ends thereof can be staggered; thus, all nucleotides within a double-stranded polynucleotide molecule cannot be paired. Such unpaired ends will, in general, not exceed 20 nucleotides in length.

[0508] As used herein, production by recombinant means by using recombinant DNA methods refers to the use of the well-known methods of molecular biology for expressing proteins encoded by cloned DNA.

[0509] As used herein, “expression” refers to the process by which polypeptides are produced by transcription and translation of polynucleotides. The level of expression of a polypeptide can be assessed using any method known in art, including, for example, methods of determining the amount of the polypeptide produced from the host cell. Such methods can include, but are not limited to, quantitation of the polypeptide in the cell lysate by ELISA, Coomassie blue staining following gel electrophoresis, Lowry protein assay, and Bradford protein assay.

[0510] As used herein, a “host cell” is a cell that is used to receive, maintain, reproduce and/or amplify a vector. A host cell also can be used to express the polypeptide encoded by the vector. The nucleic acid in the vector is replicated when the host cell divides, thereby amplifying the nucleic acids.

[0511] As used herein, a “vector” is a replicable nucleic acid from which one or more heterologous proteins can be expressed when the vector is transformed into an appropriate host cell. Reference to a vector includes those vectors into which a nucleic acid encoding a polypeptide or fragment thereof can be introduced, typically by restriction digest and ligation. Reference to a vector also includes those vectors that contain nucleic acid encoding a polypeptide, such as a modified anti-TNFR1 antibody. The vector is used to introduce the nucleic acid encoding the polypeptide into the host cell for amplification of the nucleic acid, or for expression/display of the polypeptide encoded by the nucleic acid. The vectors typically remain episomal, but can be designed to effect integration of a gene or portion thereof into a chromosome of the genome. Also contemplated are vectors that are artificial chromosomes, such as yeast artificial chromosomes and mammalian artificial chromosomes. Selection and use of such vehicles are well-known to those of skill in the art. A vector also includes “virus vectors” or “viral vectors.” Viral vectors are engineered viruses that are operatively linked to exogenous genes to transfer (as vehicles or shuttles) the exogenous genes into cells.

[0512] As used herein, an “expression vector” includes vectors capable of expressing DNA that is operatively linked with regulatory sequences, such as promoter regions, that are capable of effecting expression of such DNA fragments. Such additional segments can include promoter and terminator sequences, and optionally can include one or more origins of replication, one or more selectable markers, an enhancer, a polyadenylation signal, and the like. Expression vectors are generally derived from plasmid or viral DNA, or can contain elements of both. Thus, an expression vector refers to a recombinant DNA or RNA construct, such as a plasmid, a phage, recombinant virus or other vector that, upon introduction into an appropriate host cell, results in expression of the cloned DNA. Appropriate expression vectors are well-known to those of skill in the art and include those that are replicable in eukaryotic cells and/or prokaryotic cells, and those that remain episomal, or those which integrate into the host cell genome.

[0513] As used herein, “primary sequence” refers to the sequence of amino acid residues in a polypeptide or the sequence of nucleotides in a nucleic acid molecule.

[0514] As used herein, “sequence identity” refers to the number of identical or similar amino acids or nucleotide bases in a comparison between a test and a reference polypeptide or polynucleotide. Sequence identity can be determined by sequence alignment of nucleic acid or protein sequences to identify regions of similarity or identity. For purposes herein, sequence identity is generally determined by alignment to identify identical residues. The alignment can be local or global. Matches, mismatches and gaps can be identified between compared sequences. Gaps are null amino acids or nucleotides inserted between the residues of aligned sequences so that identical or similar characters are aligned. Generally, there can be internal and terminal gaps. When using gap penalties, sequence identity can be determined with no penalty for end gaps (e.g., terminal gaps are not penalized). Alternatively, sequence identity can be determined without taking into account gaps, as the number of identical positions/length of the total aligned sequence×100.

[0515] As used herein, a “global alignment” is an alignment that aligns two sequences from beginning to end, aligning each letter in each sequence only once. An alignment is produced, regardless of whether or not there is similarity or identity between the sequences. For example, 50% sequence identity based on “global alignment” means that in an alignment of the full sequence of two compared sequences, each of 100 nucleotides in length, 50% of the residues are the same. It is understood that global alignment also can be used in determining sequence identity even when the length of the aligned sequences is not the same. The differences in the terminal ends of the sequences are taken into account in determining sequence identity, unless the “no penalty for end gaps” is selected. Generally, a global alignment is used on sequences that share significant similarity over most of their length. Exemplary algorithms for performing global alignment include the Needleman-Wunsch algorithm (Needleman et al. (1970) J. Mol. Biol. 48:443). Exemplary programs for performing global alignment are publicly available and include the Global Sequence Alignment Tool available at the National Center for Biotechnology Information (NCBI) website (ncbi.nlm.nih.gov/), and the program available at deepc2.psi.iastate.edu/aat/align/align.html.

[0516] As used herein, a “local alignment” is an alignment that aligns two sequences, but only aligns those portions of the sequences that share similarity or identity. Hence, a local alignment determines if sub-segments of one sequence are present in another sequence. If there is no similarity, no alignment will be returned. Local alignment algorithms include BLAST or Smith-Waterman algorithm (Adv. Appl. Math. 2:482 (1981)). For example, 50% sequence identity based on “local alignment” means that in an alignment of the full sequence of two compared sequences of any length, a region of similarity or identity of 100 nucleotides in length has 50% of the residues that are the same in the region of similarity or identity.

[0517] For purposes herein, sequence identity can be determined by standard alignment algorithm programs used with default gap penalties established by each supplier. Default parameters for the GAP program can include: (1) a unary comparison matrix (containing a value of 1 for identities and 0 for non-identities) and the weighted comparison matrix of Gribskov et al. Nucl. Acids Res. 14:6745 (1986), as described by Schwartz and Dayhoff, eds., Atlas of Protein Sequence and Structure, National Biomedical Research Foundation, pp. 353-358 (1979); (2) a penalty of 3.0 for each gap and an additional 0.10 penalty for each symbol in each gap; and (3) no penalty for end gaps. Whether any two nucleic acid molecules have nucleotide sequences, or any two polypeptides have amino acid sequences, that are at least 80%, 85%, 90%, 95%, 96%, 97%, 98% or 99% “identical,” or other similar variations reciting a percent identity, can be determined using known computer algorithms based on local or global alignment (see, e.g., wikipedia.org/wiki/Sequence_alignment_software, providing links to dozens of known and publicly available alignment databases and programs). Generally, for purposes herein sequence identity is determined using computer algorithms based on global alignment, such as the Needleman-Wunsch Global Sequence Alignment tool available from NCBI/BLAST (blast.ncbi.nlm.nih.gov/Blast.cgi?CMD=Web&Page_TYPE=BlastHome); LAlign (William Pearson implementing the Huang and Miller algorithm (Adv. Appl. Math. (1991) 12:337-357)); and the program from Xiaoqui Huang, available at deepc2.psi.iastate.edu/aat/align/align.html. Typically, the full-length sequence of each of the compared polypeptides or nucleotides is aligned across the full-length of each sequence in a global alignment. Local alignment also can be used when the sequences being compared are substantially the same length.

[0518] As used herein, the term “identity” represents a comparison or alignment between a test and a reference polypeptide or polynucleotide. In one non-limiting example, “at least 90% identical to” refers to percent identities from 90% to 100%, relative to the reference polypeptide or polynucleotide. Identity at a level of 90% or more is indicative of the fact that, assuming for exemplification purposes, when a test and reference polypeptide or polynucleotide with a length of 100 amino acids or nucleotides are compared, no more than 10% (i.e., 10 out of 100) of amino acids or nucleotides in the test polypeptide or polynucleotide differ from those of the reference polypeptide or polynucleotide. Similar comparisons can be made between a test and reference polynucleotide. Such differences can be represented as point mutations randomly distributed over the entire length of an amino acid sequence, or they can be clustered in one or more locations of varying length, up to the maximum allowable, e.g., 10/100 amino acid difference (approximately 90% identity). Differences also can be due to deletions or truncations of amino acid residues. Differences are defined as nucleic acid or amino acid substitutions, insertions or deletions. Depending on the length of the compared sequences, at the level of homologies or identities above about 85-90%, the result can be independent of the program and gap parameters set; such high levels of identity can be assessed readily, often without relying on software.

[0519] As used herein, a “disulfide bond” (also called an S—S bond or a disulfide bridge) is a single covalent bond derived from the coupling of thiol groups. Disulfide bonds in proteins are formed between the thiol groups of cysteine residues, and stabilize interactions between polypeptide domains, such as antibody domains.

[0520] As used herein, “coupled” or “conjugated” means attached via a covalent or noncovalent interaction.

[0521] As used herein, the phrase “conjugated to an antibody” or “linked to an antibody” or grammatical variations thereof, when referring to the attachment of a moiety to an antibody or antigen-binding fragment thereof, such as a diagnostic or therapeutic moiety, means that the moiety is attached to the antibody or antigen-binding fragment thereof by any known means for linking peptides, such as, for example, by production of fusion proteins by recombinant means, or post-translationally by chemical means. Conjugation can employ any of a variety of linking agents to effect conjugation, including, but not limited to, peptide or compound linkers, or chemical cross-linking agents.

[0522] As used herein, “antibody-dependent cell-mediated cytotoxicity,” “antibody-dependent cellular cytotoxicity” and “ADCC” refer, interchangeably, to cell-mediated reactions in which nonspecific cytotoxic cells that express Fc receptors (FcRs) (e.g., natural killer (NK) cells, neutrophils, and macrophages) recognize bound antibody on a target cell and subsequently cause lysis of the target cell. The primary cells for mediating ADCC, NK cells, express FcγRIII only, whereas monocytes express FcγRI, FcγRII and FcγRIII. FcR expression on hematopoietic cells is summarized in Table 3 on page 464 of Ravetch et al. (1991) Annu. Rev. Immunol, 9:457-492. To assess ADCC activity of a molecule of interest, an in vitro ADCC assay may be performed (see, e.g., U.S. Pat. Nos. 5,500,362 and 5,821,337).Exemplary effector cells for such assays include peripheral blood mononuclear cells (PBMCs) and natural killer (NK) cells. Alternatively, or additionally, ADCC activity of the molecule of interest may be assessed in vivo, e.g., in an animal model, such as that disclosed in Clynes et al. (1998) Proc. Natl. Acad. Sci. USA 95:652-656.

[0523] As used herein, complement-dependent cytotoxicity (CDC) is an effector function of IgG and IgM antibodies. When such antibodies are bound to a surface antigen on target cell, such as a bacterial cell or viral-infected cell, the classical complement pathway is triggered by bonding protein C1q to these antibodies, resulting in formation of a membrane attack complex (MAC) and subsequent cell lysis.

[0524] As used herein, antibody-dependent cellular phagocytosis (ADCP) is a cellular process by which effector cells with phagocytic potential, such as monocytes and macrophages, internalize target cells. Once phagocytosed, the target cell resides in a phagosome, which fuses with a lysosome for degradation of the target cell via an oxygen-dependent or independent mechanism.

[0525] As used herein “therapeutic activity” refers to the in vivo activity of a therapeutic polypeptide. Generally, the therapeutic activity is the activity that is associated with treatment of a disease or condition. Therapeutic activity of a modified polypeptide can be any level of percentage of the therapeutic activity of the unmodified polypeptide, including but not limited to, 1% of the activity, 2%, 3%, 4%, 5%, 10%, 20%, 30%, 40%, 50%, 60%, 70%, 80%, 90%, 91%, 92%, 93%, 94%, 95%, 96%, 97%, 98%, 99%, 100%, 200%, 300%, 400%, 500%, or more, of the therapeutic activity compared to the unmodified polypeptide.

[0526] As used herein, the term “assessing” is intended to include quantitative and qualitative determination in the sense of obtaining an absolute value for the activity of a protein, such as an antibody, or an antigen-binding fragment thereof, present in the sample, and also, of obtaining an index, ratio, percentage, visual, or other value indicative of the level of the activity. Assessment can be direct or indirect.

[0527] As used herein, a “disease or disorder” refers to a pathological condition in an organism, resulting from a cause or condition including, but not limited to, infections, acquired conditions, and genetic conditions, and characterized by identifiable symptoms.

[0528] As used herein, “treating” a subject with a disease or condition means that the subject's symptoms are partially or totally alleviated, or remain static following treatment. Hence, treatment encompasses prophylaxis, therapy and/or cure. Prophylaxis refers to prevention of a potential disease and/or a prevention of worsening of symptoms or progression of a disease. Treatment also encompasses any pharmaceutical use of any antibody or antigen-binding fragment thereof, or compositions, provided herein.

[0529] As used herein, treatment means amelioration of a symptom or manifestation of a disease, disorder, or condition.

[0530] As used herein, “prevention” or “prophylaxis,” refers to methods in which the risk of developing a disease or condition is reduced. To prevent a disease means to reduce the risk of developing the disease.

[0531] As used herein, a “pharmaceutically effective agent” includes any therapeutic agent or bioactive agent, including, but not limited to, for example, anesthetics, vasoconstrictors, dispersing agents, and conventional therapeutic drugs, including small molecule drugs and therapeutic proteins.

[0532] As used herein, a “therapeutic effect” means an effect resulting from treatment of a subject that alters, typically improves or ameliorates, the symptoms of a disease or condition, or that cures a disease or condition.

[0533] As used herein, a “therapeutically effective amount” or a “therapeutically effective dose” refers to the quantity of an agent, compound, material, or composition containing a compound that is at least sufficient to produce a therapeutic effect following administration to a subject. Hence, it is the quantity necessary for preventing, curing, ameliorating, arresting or partially arresting a symptom of a disease or disorder.

[0534] As used herein, “therapeutic efficacy” refers to the ability of an agent, compound, material, or composition containing a compound to produce a therapeutic effect in a subject to whom the agent, compound, material, or composition containing a compound has been administered.

[0535] As used herein, a “prophylactically effective amount” or a “prophylactically effective dose” refers to the quantity of an agent, compound, material, or composition containing a compound, that, when administered to a subject, will have the intended prophylactic effect, e.g., preventing or delaying the onset, or reoccurrence, of disease or symptoms, reducing the likelihood of the onset, or reoccurrence, of disease or symptoms, or reducing the incidence of viral infection. The full prophylactic effect does not necessarily occur by administration of one dose, and can occur only after administration of a series of doses. Thus, a prophylactically effective amount can be administered in one or more administrations.

[0536] As used herein, amelioration of the symptoms of a particular disease or disorder by a treatment, such as by administration of a pharmaceutical composition or other therapeutic, refers to any lessening, whether permanent or temporary, lasting or transient, of the symptoms, that can be attributed to or associated with administration of the composition or therapeutic.

[0537] As used herein, a “prodrug” is a precursor or derivative form of a pharmaceutically active substance that is less cytotoxic to tumor cells compared to the parent drug and is capable of being enzymatically activated or converted into the more active parent form (see, e.g., Wilman, 1986, Biochemical Society Transactions, 615th Meeting Belfast, 14:375-382; and Stella et al., “Prodrugs: A Chemical Approach to Targeted Drug Delivery,” Directed Drug Delivery, Borchardt et al., (ed.), pp. 247-267, Humana Press, 1985).

[0538] As used herein, an “anti-cancer agent” refers to any agent that is destructive or toxic to malignant cells and tissues. For example, anti-cancer agents include agents that kill cancer cells or otherwise inhibit or impair the growth of tumors or cancer cells. Exemplary anti-cancer agents are chemotherapeutic agents.

[0539] As used herein, an “anti-angiogenic agent” or “angiogenesis inhibitor” is a compound that blocks, or interferes with, the development of blood vessels.

[0540] As used herein, a TNF-related or TNF-mediated disease refers to a disease, condition, or disorder in which TNFR1 or TNFR1 signaling plays a role in the etiology; included are diseases, disorders, and conditions in which inhibition of TNFR1 signaling can be ameliorative of a symptom of the disease, condition, or disorder.

[0541] As used herein, a “TNFR2 agonist,” or an “anti-TNFR2 agonist,” refers to compounds, including small molecules and TNFR2 antibodies or antigen-binding fragments thereof, and other polypeptides that initiate, promote, or increase activation of TNFR2 and/or potentiate one or more signal transduction pathways mediated by TNFR2. For example, TNFR2 agonists can promote or increase the proliferation of a population of Treg cells. TNFR2 agonists can promote or increase TNFR2 activation by binding to TNFR2, e.g., to induce a conformational change that renders the receptor biologically active. For example, TNFR2 agonists can nucleate the trimerization of TNFR2 in a manner similar to or that mimics the interaction between TNFR2 and its cognate ligand, TNF (TNF-α), thus inducing TNFR2-mediated signaling. TNFR2 agonists also can induce the proliferation of CD4⁺, CD25⁺, FOXP3⁺ Treg cells. TNFR2 agonists can also suppress the proliferation of cytotoxic T lymphocytes (e.g., CD8⁺ T-cells), e.g., through activation of immunomodulatory Treg cells or by directly binding to TNFR2 on the surface of an autoreactive cytotoxic T-cell and inducing apoptosis. A TNFR2 agonist antibody or fragment thereof, for use in the methods herein, can specifically bind to TNFR2, and generally is sufficiently specific so that it does not specifically binding to another receptor of the tumor necrosis factor receptor (TNFR) superfamily member, such as TNFR1.

[0542] As used herein, a TNFR2-selective agonist is a TNFR2 agonist that does not or substantially does not result in TNFR1 signaling activity.

[0543] As used herein, a Treg expander is a molecule, including small molecules and polypeptides, that increases regulatory T cells (Treg cells or Tregs), which are an immunosuppressive subpopulation of T cells with immunosuppressive properties via production of cytokines.

[0544] As used herein, an “extracellular domain” or “ECD” is the portion of a cell surface receptor that occurs on the surface of the receptor and includes the ligand-binding site(s). For purposes herein, reference to an “ECD polypeptide” includes any ECD-containing molecule, or portion thereof, as long as the ECD polypeptide does not contain any contiguous sequence associated with another domain (e.g., transmembrane domain, protein kinase domain, or others) of a cognate receptor.

[0545] As used herein, “knobs into holes” or “knobs-in-holes” (KIH), refers to multimerization domains, such as immunoglobulin Fc domains, engineered so that steric interactions between and/or among such domains, promote stable interaction, and promote the formation of heterodimers (or heteromultimers) compared to homodimers (or homomultimers) from a mixture of monomers. This can be achieved, for example, by constructing knobs or protuberances and holes or cavities in the complementary multimerizing domains. “Knobs” can be constructed by replacing small amino acid side chains from the interface of the first multimerizing domain polypeptide (e.g., first Fc monomer) with larger side chains (e.g., tyrosine or tryptophan). Compensatory “holes” of identical or similar size to the knobs optionally are created on the interface of the second complementary multimerizing polypeptide (e.g., second Fc monomer) by replacing large amino acid side chains with smaller ones (e.g., alanine or threonine).

[0546] As used herein, “tethering” refers to the interaction between two domains of a receptor monomer, whereby the monomer occurs in a conformation that renders it less available for interaction. For example, subdomain II in HER1, HER3 and HER4, can interact with subdomain IV, forming a tethered, inactive structure. When in a tethered state, a receptor or isoform thereof is less available, or is unavailable, for dimerization and/or ligand binding. The ECDs of the monomeric forms of HER1, HER3 and HER4 occur in a tethered form that exhibits lower ligand affinity than the untethered form. HER2, which lacks certain residues in subdomain IV, occurs in an untethered form and is available for dimerization with HER1, HER3 and HER4. Upon ligand binding to a tethered (monomeric) form, the tethering interaction is released, and the ECD (or receptor) is in a conformation available for dimerization, which involves interactions between domains II of two ECDs.

[0547] As used herein, the term “subject” refers to an animal, including a mammal, such as a human being.

[0548] As used herein, a “patient” refers to a human subject.

[0549] As used herein, “animal” includes any animal, such as, but not limited to, primates including humans, gorillas and monkeys; rodents, such as mice and rats; fowl, such as chickens; ruminants, such as goats, cows, deer, and sheep; pigs; and other animals. Non-human animals exclude humans as the contemplated animal. The polypeptides provided herein are from any source, animal, plant, prokaryotic and fungal. Most polypeptides are of animal origin, including mammalian origin, and generally, for therapeutic use, are human or humanized.

[0550] As used herein, a “composition” refers to any mixture. It can be a solution, suspension, liquid, powder, paste, aqueous, non-aqueous, or any combination thereof.

[0551] As used herein, a “stabilizing agent” refers to compound added to the formulation to protect either the antibody or conjugate, such as under the conditions (e.g., temperature) at which the formulations herein are stored or used. Thus, included are agents that prevent proteins from degradation from other components in the compositions. Exemplary of such agents are amino acids, amino acid derivatives, amines, sugars, polyols, salts and buffers, surfactants, inhibitors, or substrates and other agents as described herein.

[0552] As used herein, a “combination” refers to any association between or among two or more items. The combination can be two or more separate items, such as two compositions or two collections, a mixture thereof, such as a single mixture of the two or more items, or any variation thereof. The elements of a combination are generally functionally associated or related, such as elements used in a method.

[0553] As used herein, “combination therapy” refers to the administration of two or more different therapeutics, such as an anti-TNFR construct or such as an antibody or antigen-binding fragment thereof, provided herein, and one or more therapeutics or other treatment(s), such as radiation and surgery. Multiple therapeutic agents can be provided and administered separately, sequentially, intermittently, simultaneously, or in a single composition.

[0554] As used herein, a “kit” is a packaged combination that optionally includes other elements, such as additional reagents and instructions for use of the combination or elements thereof, for a purpose including, but not limited to, activation, administration, diagnosis, and assessment of a biological activity or property.

[0555] As used herein, a “unit dose form” refers to physically discrete units suitable for human and animal subjects, and packaged individually, as is known in the art.

[0556] As used herein, a “single dosage formulation” refers to a formulation for direct administration.

[0557] As used herein, a “multi-dose formulation” refers to a formulation that contains multiple doses of a therapeutic agent and that can be directly administered to provide several single doses of the therapeutic agent. The doses can be administered over the course of minutes, hours, weeks, days or months. Multi-dose formulations can allow dose adjustment, dose-pooling, and/or dose-splitting. Because multi-dose formulations are used over time, they generally contain one or more preservatives to prevent microbial growth.

[0558] As used herein, an “article of manufacture” is a product that is made and sold.

[0559] As used throughout this application, the term is intended to encompass any of the compositions provided herein contained in articles of or for packaging.

[0560] As used herein, a “fluid” refers to any composition that can flow. Fluids thus encompass compositions that are in the form of semi-solids, pastes, solutions, aqueous mixtures, gels, lotions, creams and other such compositions.

[0561] As used herein, an isolated or purified polypeptide or protein (e.g., an isolated antibody or antigen-binding fragment thereof), or biologically-active portion thereof (e.g., an isolated antigen-binding fragment), is substantially free of cellular material or other contaminating proteins from the cell or tissue from which the protein is derived, or substantially free from chemical precursors or other chemicals when chemically synthesized. Preparations can be determined to be substantially free if they appear free of readily detectable impurities as determined by standard methods of analysis, such as thin layer chromatography (TLC), gel electrophoresis, and high performance liquid chromatography (HPLC), used by those of skill in the art to assess such purity, or sufficiently pure such that further purification does not detectably alter the physical and chemical properties, such as enzymatic and biological activities, of the substance.

[0562] Methods for purification of the compounds to produce substantially chemically pure compounds are known to those of skill in the art. A substantially chemically pure compound, however, can be a mixture of stereoisomers. In such instances, further purification might increase the specific activity of the compound.

[0563] As used herein, a “cellular extract” or “lysate” refers to a preparation or fraction which is made from a lysed or disrupted cell.

[0564] As used herein, a “control” refers to a sample that is substantially identical to the test sample, except that it is not treated with a test parameter, or, if it is a plasma sample, it can be from a normal volunteer not affected with the condition of interest.

[0565] A control also can be an internal control.

[0566] As used herein, the singular forms “a,” “an” and “the” include plural referents unless the context clearly dictates otherwise. Thus, for example, reference to a polypeptide, containing “an immunoglobulin domain” includes polypeptides with one or a plurality of immunoglobulin domains.

[0567] As used herein, the term “or” is used to mean “and/or” unless explicitly indicated to refer to alternatives only, or the alternatives are mutually exclusive.

[0568] As used herein, ranges and amounts can be expressed as “about” a particular value or range. “About” also includes the exact amount. Hence “about 5 amino acids” means “about 5 amino acids” and also “5 amino acids.” For particular parameters about is a range within experimental error or a range acceptable to one of skill in the art for a particular parameter.

[0569] As used herein, “optional” or “optionally” means that the subsequently described event or circumstance does or does not occur, and that the description includes instances where said event or circumstance occurs and instances where it does not. For example, an optionally variant portion means that the portion is variant or non-variant.

[0570] As used herein, the abbreviations for any protective groups, amino acids and other compounds, are, unless indicated otherwise, in accord with their common usage, recognized abbreviations, or the IUPAC-IUB Commission on Biochemical Nomenclature (see, Biochem. (1972) 11(9):1726-1732).

[0571] For clarity of disclosure, and not by way of limitation, the detailed description is divided into the subsections that follow.

### B. Overview of Constructs and Methods

[0572] Autoimmune disease occurs when the body's immune system attacks itself. The resulting inflammation and tissue destruction is initiated by an inflammatory hormone called tumor necrosis factor (TNF). There are more than 100 types of autoimmune disease; overall, about 75% of those with an autoimmune disease are women. Prior drugs for autoimmune disease have adverse side effects, including infections, heart problems, and other diseases and disorders,

[0573] TNF interacts with immune cells via two receptors, TNFR1, which is overactive in autoimmune disease, and TNFR2 which suppresses autoimmune disease, but is muted when TNFR1 is overactive. TNF blockers, such as infliximab (sold as Remicade®), adalimumab (sold as Humira®), and etanercept (sold as Enbrel®) block TNFR1 and TNFR2, resulting in the adverse side effects. Constructs provided herein address this problem. Constructs provided herein shut down only TNFR1, which leads to increased TNFR2 activity, thereby not only treating autoimmune disease symptoms, but providing improved treatment and reduced or no adverse side effects because TNFR2 activity is not blocked. Provided herein a variety of constructs that address the problems with the prior art TNF blockers. Types of constructs identified by their activity, and detailed and provided herein, are summarized in the following table:

| Type of Construct | Disease to be Treated | Action |
|---|---|---|
| TNFR1 | Autoimmune disease | Specific blockade of TNFR1; |
| Antagonists | and acute | spares TNFR2 |
| | inflammation | |
| TNFR2 | Cancer checkpoint | Inhibition of tumoral |
| Antagonists | inhibitor | suppressor Treg function |
| | | thus increases active |
| | | immunity |
| TNFR2 Agonists | Inflammation and | Induces proliferation of |
| | fibrosis | Treg to reduce inflammation |

[0574] Provided are constructs for treatment of TNF-mediated diseases, disorders, and conditions, or diseases, disorders, and conditions in which TNF plays a role in the etiology, or in which interference with TNFR1 signaling has an ameliorative effect. For example, the TNFR1 antagonists can be used for treatment of a variety of disorders, including autoimmune disorders, and also diseases and conditions, such as endometriosis, brain fog, such as from chemotherapy and COVID, Alzheimer's disease, acute inflammation, such as results from infection by influenza viruses, and SARS-COV2, which results in long-lasting or permanent damage to the lungs, kidneys, and other tissues. Because of the adverse effects and consequent safety concerns with prior TNF blockers, they cannot be used for most of these indications. The TNFR1 antagonist constructs provided herein can be used. These constructs as described herein are monovalent in that they only inhibit TNFR1 and do not cause receptor clustering, they are specific, non-immunogenic, and have a half-life of at least about 3-4 weeks, permitting approximately once-a-month dosing.

[0575] Hence, provided are TNFR1 antagonist constructs, TNFR2 agonist constructs, and multi-specific, such as bi-specific constructs that include TNFR1 antagonist and TNFR2 agonist activity. The constructs include at least one moiety that specifically interacts with TNFR1 or TNFR2, and, generally, a further moiety that modulates the interaction directly or indirectly or that provides a pharmacological (pharmacodynamic or pharmacokinetic or both) property to the construct. Hence a construct as provided herein includes at least two moieties: a binding moiety that interacts with TNFR1 or TNFR2, and a second moiety that modulates or alters pharmacological properties or activities of the construct or the binding moiety.

[0576] Among the constructs provided herein are those that are antagonists of TNFR1 activity. The TNFR1 antagonist constructs contain a portion that binds to or interacts with TNFR1 and inhibits TNFR1-mediated signaling, and a second portion that confers additional properties, such as extended serum half-life, elimination of ADCC and/or CDC activity, and modulation of interaction with particular receptors. The TNFR1 antagonists and constructs also include modification(s) so that they have none or reduced immunogenicity, particularly in a human, and also can include modifications to eliminate or reduce binding to pre-existing antibodies.

[0577] The TNFR1 antagonist constructs, are selected to specifically bind to TNFR1, and to have minimal or no binding to TNFR2 or no TNFR2 antagonist activity. Thus, the constructs only modulate TNFR1. In some embodiments, the TNFR1 antagonist constructs are selected to also have or to be linked to a second domain or moiety that has TNFR2 agonist activity. The TNFR1 constructs, include those that are designed or selected to interact with TNFR1 with affinity, such as K_{d}<50 nM or <10 nM or <5 nM, and particularly with higher affinity (as K_{d}<1 nM or <0.1 nM or higher affinity) and/or potent inhibition of TNFR1 signaling (e.g., IC₅₀50 nM or <10 nM or <5 nM or <3 nM or, 1 nM or <0.5 nM).

[0578] Also provided are multi-specific, such as bi-specific, constructs that contain a TNFR1 antagonist moiety, linked directly, or via a linker, to a TNFR2 agonist moiety. The linker provides advantageous properties to the molecules, such as, for example, increased serum half-life, increased stability, proper three-dimensional structure and flexibility, and improved pharmacological properties. These constructs solve problems associated with the administration of other therapies, such as anti-TNF therapies (“TNF Blockers,” (examples include etanercept (Enbrel®), adalimumab (Humira®), Infliximab)), because these constructs increase the specificity of TNFR1 inflammatory blockade and result in conservation or amplification of TNFR2 function, which is a natural immunosuppressor, at least in part by up-regulation of immunosuppressive Tregs, and the induction of protective and anti-inflammatory signaling pathways. In addition, TNF Blockade resulting in inhibition of TNFR2 function also reduces the T cell-induced monocyte activation leading to increased possibility of opportunistic infections (see e.g., Rossel et al. (2007) J. Immunol. 179:4239-48).

[0579] There are numerous differences between the activity of exemplary TNFR1 antagonist constructs provided herein and existing approved TNF Blockers: TNF Blockers, such as etanercept, adalimumab, infliximab, is that they are not specific for TNFR1. Other blockers, such as like 1L6, IL17, IL23 only block their own part of the cytokine cascade, not the whole thing. Existing TNF blockers have the same mechanism of action for TNFR1 and TNFR2, thereby blocking the activity of both. JAK inhibitors pose similar problems; they have inflammatory and anti-inflammatory activities. For example, the inflammatory cytokine Ill is not blocked by JAK inhibitors, the inflammatory cytokine IL6 is blocked by JAK inhibitors (a second line use for rheumatoid arthritis treatment), and IL10, which is anti-inflammatory, is not blocked by JAK inhibitors. Constructs provided herein, in contrast, combine the effectiveness of TNFR1 and TNF inhibitor therapies with the benefits of TNFR2 agonists that eliminate or reduce the adverse effects of anti-TNFR1/anti-TNF therapies, and also contribute additional therapeutic modalities advantages, including the up-regulation of immunosuppressive Tregs, and the induction of protective and anti-inflammatory signaling pathways.

[0580] The TNFR1 antagonist constructs contain one or more TNFR1 inhibitors, one or more linkers, and one or more activity modifiers. For example, the structure of the TNFR1 antagonist constructs provided herein can be represented by the formulae 1:

(TNFR1 inhibitor)ₙ-linkerₚ-(activity modifier)_{q}, Formula 1a, or

(activity modifier)g-linkerₚ-(TNFR1 inhibitor)ₙ Formula 1b, where:

each of n and q is an integer, and each is independently 1, 2, or 3; p is 0, 1, 2 or 3; and an activity modifier is a moiety, such as a polypeptide, such as albumin, or an Fc that is modified to have reduced or no ADCC activity, that increases serum half-life of the TNFR1 inhibitor; and the TNFR1 inhibitor is a molecule, such as a polypeptide or small drug molecule that binds to TNFR1 and inhibits its activity, such as signaling activity. The activity modifier is not a human serum albumin antibody or an unmodified single Fc. Activity modifiers include modified Fc regions, such as Fc modified to eliminate ADCC and/or CDC activity, Fc dimers, and other antibody domains. The linkers include chemical linkers, and polypeptides, such as GS linkers, and hinge regions, such as from antibodies, so that the constructs include chemical conjugates, fusion proteins, and combinations of both.

[0581] Also provided are multi-specific constructs. The structure of the multi-specific, such as, bi-specific, constructs provided herein is represented by the following formula (Formula 2):

(TNFR1 inhibitor)ₙ-(activity modifier)ᵣ₁-(Linker(L))ₚ-(activity modifier)ᵣ₂-(TNFR2 agonist)_{q},

where n=1, 2, or 3, p=1, 2, or 3, q=0, 1 or 2, and each of r1 and r2 is independently 0, 1, or 2. As with the constructs of formulae 1 the order of components can be varied and there can be additional linkers as needed. The constructs can include additional linkers as required for conferring properties such as flexibility. Each linker can contain a plurality of components. Formula 2 also can include an activity modifier in place of or in addition to a linker. Activity modifiers and linkers include, an Fc or and Fc with a hinge region, or an Fc with a GS linker, or other combinations of components. The Fc in these constructs include unmodified Fc regions; the linkers are as described above, and detailed below.

[0582] Also provided are TNFR2 agonist constructs that have formulae 3:

(TNFR2 agonist)ₙ-linkerₚ-(activity modifier)_{q}, formula 3a, or

(activity modifier)g-linkerₚ-(TNFR2 agonist)ₙ, formula 3b,

where n, p and q are as set forth for formula 1, and the linkers and activity modifier are as described in formula 1.

[0583] The components, which are discussed in detail in the following sections, of formulae 1-3 can be polypeptides or other molecules, such as small drugs that specifically bind to or interact with the targeted receptor. Each component of the constructs/molecules provided herein is described in turn in sections below.

[0584] The properties of each component of the constructs provided herein is discussed in detail in sections below. The components of the constructs, thus, include, but are not limited to, the following components, which are discussed in detail in Sections that follow:
[0585] 1. TNFR1 Antagonists
[0586] 2. TNFR2 Agonists
[0587] 3. Linkers
   [0588] a. Glycine-Serine Linkers
   [0589] b. Hinge Regions
   [0590] c. chemical linkers
[0591] 4. Activity modifiers
   [0592] a. Modified Fcs
   [0593] b. Polypeptides and other moieties that confer improved or altered pharmacological properties, such as increased serum half-life, resistance to degradation by endogenous proteases, and other such properties.
      Other constructs, detailed in Sections that follow, also are provided.

[0594] The constructs are used in methods of treatment of diseases, disorders, and conditions in which TNF in a pathologic modifier of the disease, condition, or disorder, such that inhibition TNFR1 signaling is reduced or inhibited, and/or in which inhibition of TNF or TNFR1 signaling can suppress or cause regression of the disease, disorder, or condition, and/or in which inhibition ameliorates a symptom of the disease, disorder, and/or condition. Such diseases, conditions, and disorders, which include inflammatory diseases, including autoimmune diseases, are discussed in the section that follows.

[0595] Also provided are pharmaceutical compositions for use in the methods and uses, and nucleic acids and vectors for producing constructs that include polypeptides and those that are fusion proteins. The following sections describe diseases, disorders, and conditions, TNFR1/TNFR2 activities and their roles in the diseases, disorders, and conditions, existing treatments for the diseases, disorders, and conditions, constructs and components thereof that are provided herein, methods of producing the constructs, pharmaceutical compositions containing the constructs and/or encoding nucleic acids, and methods of treatment.

### C. Tumor Necrosis Factor (TNF) and Chronic Inflammatory and Autoimmune Diseases and Disorders

[0596] This section describes the role that tumor necrosis factor (TNF) and/or its receptors play in inflammatory and autoimmune diseases, particulars of exemplary diseases, and problems with existing therapies, and shows how the constructs provided herein address these problems.

[0597] TNF-α acts as a trimer and has two high affinity receptors:TNFR1 and TNFR2. TNFR1 is the first to be activated by TNF. It is ubiquitously expressed, and is involved in autoimmune disorders, bone loss, cytokine release syndrome, inflammatory disorders, Alzheimer's Disease, acute and long-term Covid, and other diseases, disorders, and conditions. TNFR2 is slower to activate; it has higher expression in myeloid and regulatory TT cells; it is associated with immunosuppression, with tissue repair, including cardiac; and is involved in macrophage surveillance/killing of invading pathogens and incipient tumor cells. As described throughout the disclosure herein, prior art TNF blockers inhibit both receptors, thereby compromising advantageous TNFR2 activities.

[0598] Anti-TNF-α treatments of the prior art block TNFR1 (pro-inflammatory) and TNFR2 (anti-inflammatory), which results in serious side effects including a risk of infection, cardiovascular abnormalities and cancer. The constructs provided herein are TNFR1-specific antagonists that do not inhibit TNFR2 and do not have TNFR1 agonist activity. These constructs can be used for treatment of a variety of diseases, disorders, and conditions in which TNF plays a role. These include rheumatoid arthritis, other autoimmune diseases, and cognitive disorders. By sparing TNFR2 function, a specific TNFR1 antagonist provides a safer treatment with reduced side effects, and a longer duration of symptom relief, thus benefiting a broader patient population.

[0599] TNFR1 has ubiquitous expression, dominant inflammatory signaling and necrosis/apoptosis, and is associated with arthritis, cytokine storm syndromes, heart failure, Alzheimer's disease and others. TNFR2 has higher expression in myeloid and regulatory T-cells. TNFR2 is slow to activate and is associated with being anti-inflammatory, immunoregulatory, it also promotes Treg function, tissue repair and proliferation. Prior art clinical TNF blockers inhibit both TNFR1 and TNFR2, thus compromising a natural mechanism of return to homeostasis after an immune insult activates TNF production.

[0600] Constructs exemplified herein in the Examples, including constructs designated EN-1206 (EN-1206-MV (monovalent) and -BV (bivalent)), are shown to be more potent than etanercept and have no detectable agonist activity. Constructs provided herein, such as the EN-1206 molecules, are designed to minimize FcR binding and to enhance FcRn recycling. The constructs herein can be engineered for monthly subcutaneous dosing. Exemplary constructs are depicted in FIGS. 8A and 8B.

[0601] In contrast to the 1206 construct, the 1208 construct has agonist activity, and thus, is not included among the constructs provided herein as having the ability to antagonize TNFR1, while not inhibiting TNFR2, and, not agonizing TNFR1. The dAbs (VHH) employed in the construct provided herein are those that bind to the same epitope as the 1206 constructs and do not bind the epitope to which 1208 binds.

[0602] Components of the constructs are detailed below and in the Examples.

[0603] Constructs contemplated herein are those in which the VHH component, a dAb, such as those exemplified herein (see e.g., SEQ ID Nos: 54-672), is one that binds TNFR1, does not bind TNFR2, and is identified by assay or by identifying those that bind the same epitope as the 1206 constructs.

### 1. Tumor Necrosis Factor (TNF)

[0604] Tumor necrosis factor (TNF; see e.g., SEQ ID NO:1; also referred to as TNF alpha, TNF-α, or TNFα) is a pleiotropic, proinflammatory cytokine that is associated with inflammatory and immuno-regulatory activities, including the regulation of tumorigenesis/cancer, host defense against pathogenic infections, apoptosis, autoimmunity, and septic shock, and that plays an important role in the coordination of innate and adaptive immune responses, as well as organogenesis, particularly of the lymphoid organs. In humans, TNF is produced primarily by macrophages, and also can be produced by monocytes, dendritic cells (DCs), B cells, T cells, fibroblasts and other cell types. It is produced as a homotrimeric membrane-bound protein containing 233 amino acids (26 kDa) that can be cleaved by the protease TACE (TNF alpha converting enzyme; also known as ADA17) to release soluble TNF, which contains 157 amino acids (17 kDa); membrane-bound and soluble forms of TNF are biologically active. Transmembrane human TNF contains 233 amino acids, and contains a cytoplasmic domain, corresponding to residues 1-35, a transmembrane domain, corresponding to residues 36-56, and an extracellular domain, corresponding to residues 57-233, with reference to SEQ ID NO:1. The soluble form of TNF corresponds to amino acid residues 77-233, as set forth in SEQ ID NO:1 (see, SEQ ID NO:2 for the sequence of amino acid residues of soluble TNF).

[0605] Uncontrolled production of TNF is associated with several inflammatory and autoimmune diseases and conditions, including, for example, septic shock, rheumatoid arthritis, psoriasis, psoriatic arthritis, ankylosing spondylitis, juvenile idiopathic arthritis, and inflammatory bowel disease (IBD). The overexpression of TNF also has been associated with neurodegenerative diseases and conditions, such as, for example, Alzheimer's disease, Parkinson's disease, stroke and multiple sclerosis. Additionally, TNF promotes osteoclastogenesis, and overproduction of TNF is associated with bone loss. In rheumatoid arthritis (RA), TNF is over-expressed in synovial fluids and in the synovial membrane, while expression of TNF receptors (TNFRs) is up-regulated in the synovial membrane. For example, overexpression of human TNF in mice results in the development of spontaneous RA-like lesions in the joints with the formation of hyperplastic synovial membranes and the destruction of cartilage and bone (see, e.g., Blüml et al. (2010) Arthritis & Rheumatism 62(6):1608-1619; Keffer et al. (1991) EMBO J. 10(13):4025-4031; Esperito Santo et a. (2015) Biochem. Biophys. Res. Commun. 464:1145-1150; Blüml et al. (2012) International Immunology 24(5):275-281; Dong et al. (2016) Proc. Natl. Acad. Sci. USA 113(43):12304-12309).

[0606] As discussed further below, TNF signals through two high-affinity, specific receptors, TNFR1 and TNFR2; TNFR1 is associated with detrimental inflammatory processes, while TNFR2 is associated with beneficial immuno-regulatory processes. It has been shown that membrane-bound TNF primarily activates TNFR2, while soluble TNF primarily activates TNFR1 (Blüml et al. (2010) Arthritis & Rheumatism 62(6):1608-1619). Soluble TNF (solTNF; corresponding to residues 77-233 of SEQ ID NO:1; see, also, the sequence set forth in SEQ ID NO:2), which is involved in paracrine signaling (primarily via TNFR1), is associated with chronic inflammation, whereas transmembrane TNF (tmTNF), which acts via cell-to-cell contact to induce juxtacrine signaling (primarily via TNFR2), is associated with the resolution of inflammation and with the induction of immunity against pathogens, such as Listeria monocytogenes and Mycobacterium tuberculosis (Zalevsky et al. (2007) J. Immunol. 179:1872-1883). Thus, TNF signaling through TNFR1 and TNFR2, effects different outcomes, depending on the receptor type.

[0607] Due to the association between TNF overexpression and the development of inflammatory and autoimmune diseases and conditions, the blockade of TNF has been used in the treatment of various such diseases and conditions, including, but not limited to, rheumatoid arthritis (RA), psoriasis, psoriatic arthritis, ankylosing spondylitis, juvenile idiopathic arthritis (JIA), and inflammatory bowel disease (IBD; e.g., Crohn's disease, ulcerative colitis). The use of TNF blockers, which block TNF and prevent signaling via both TNFR1 and TNFR2, is associated with an increased risk of serious infections, such as tuberculosis and listeriosis, due to immunosuppression. TNF blockers not only block detrimental inflammatory signaling via TNFR1, but also block beneficial, immune-regulatory signaling via TNFR2. As a result, the use of TNF blockers, particularly in the case of chronic diseases/conditions that require long-term administration, such as arthritis or IBD, can be limited. Approximately one-third of RA patients are non-responsive, or therapeutic benefits are not sustained, with the use of anti-TNF therapies. Thus, there is a need for therapies with improved therapeutic efficacy and safety, particularly therapies that block the inflammatory effects of TNFR1 signaling, but maintain, or boost, the beneficial anti-inflammatory effects of TNFR2 signaling. Such therapies are provided herein.

### 2. Tumor Necrosis Factor Receptors (TNFRs)

[0608] Homotrimers of TNF bind to and signal through two specific, high-affinity homotrimeric receptors, TNFR1 (TNF receptor type 1; also known to as TNFRI, p55, p60, CD120a, TNF receptor superfamily member 1A, and TNFRSF1A), and TNFR2 (TNF receptor type 2; also known as TNFRII, p75, p80, CD120b, TNF receptor superfamily member 1B, and TNFRSF1B). TNFR1 is expressed by all nucleated cell types; TNFR2 expression is restricted to immune cells (e.g., monocytes, macrophages, activated T cells, regulatory T cells (Tregs), B cells and natural killer (NK) cells), endothelial cells, particular central nervous system (CNS) cells, and particular cardiac cells. TNFR2 expression on Tregs is induced upon T-cell receptor activation.

[0609] In vivo, TNFR1 and TNFR2 exist as membrane-bound receptors, and as soluble, “decoy” (i.e., non-signaling) receptors, following shedding from cell surfaces. Soluble TNF preferentially/selectively binds to TNFR1; binding of the membrane-bound and soluble forms of TNF, however, activates TNFR1. The primary ligand for TNFR2 is membrane-bound TNF. Soluble TNF does not fully activate TNFR2, but the soluble form of TNFR2 (following TNFR2 shedding) has a high binding affinity for TNF, allowing it to scavenge and inhibit TNF from binding membrane-bound, signaling receptors, which contributes to the anti-inflammatory effects of TNFR2. Membrane-bound TNFR2 binds TNF with rapid on and off kinetics, allowing TNFR2 to concentrate TNF on cell surfaces and pass the ligand to TNFR1, which mediates TNFR1 signaling. Each of TNFR1 and TNFR2 contains extracellular, transmembrane and cytoplasmic domains. The extracellular domains of TNFR1 and TNFR2 contain four cysteine-rich domains (CRDs) that are required for ligand binding. The intracellular domains of TNFR1 and TNFR2 initiate different signaling cascades, and mediate different effector functions, in response to TNF ligand binding.

[0610] TNFR signaling abnormalities are associated with several autoimmune diseases, and the administration of TNF can be used as a treatment strategy for such diseases. For example, low dose TNF selectively destroys autoreactive T cells in blood samples from type I diabetes and scleroderma patients, and in an animal model of Sjogren's syndrome. The administration of TNF can result in systemic toxicity, for example, in cancer patients with high TNF levels. As described herein, the toxicity results from the ubiquitous cellular expression of TNFR1; as described herein, agonizing TNFR2 is a safer therapeutic option than administration of TNF, due to its more restricted cellular expression. Promotion of TNF signaling via TNFR2 can be effected by administering a TNFR1 antagonist (see, e.g., Faustman et al. (2013) Front. Immunol. 4:478).

a. TNFR1

[0611] Human TNFR1 (see, SEQ ID NO:3), is the major inflammatory receptor, and accounts for the majority of the proinflammatory, cytotoxic and apoptotic effects attributed to TNF. Human TNFR1 is a homotrimeric receptor, and its binding by TNF induces a pro-inflammatory response (see, e.g., Morton et al. (2019) Sci Signal. 12(592):eaaw2418, for a description of TNFR1 signaling). TNFR1 contains 455 amino acid residues; residues 1-29 correspond to the signal peptide, residues 30-211 correspond to the extracellular domain, residues 212-232 correspond to the transmembrane domain, and residues 233-455 correspond to the cytoplasmic domain. Within the extracellular domain, TNFR1 contains cysteine-rich domains (CRDs) 1-4, corresponding to amino acid residues 43-82, 83-125, 126-166 and 167-196 of SEQ ID NO:3, respectively. CRDs 2 and 3 contact bound TNF, and CRD1, particularly amino acid residues 30-82 with reference to SEQ ID NO:3, forms the pre-ligand binding assembly domain (PLAD), a hemophilic interaction motif that is necessary for ligand binding and receptor function. The cytoplasmic domain contains a death domain (corresponding to residues 356-441 of SEQ ID NO:3) that binds to the TNFR1-associated death domain (TRADD) and the Fas-associated death domain (FADD) following the binding of TNF to TNFR1, resulting in signaling pathways that activate caspases and induce apoptosis. The binding of TNF to TNFR1 also initiates proinflammatory cascades through MAPK (mitogen-activated protein kinase; e.g., p38, JNK, ERK) and NF-κB (nuclear factor kappa-light-chain-enhancer of activated B cells) signaling pathways. TNFR1 plays a role in lymphatic organogenesis and in the immune response to pathogens, and is the primary receptor associated with host antiviral defense mechanisms. It has been shown that mycobacterial containment depends on TNF-derived signals, and that patients treated with TNF-blockers can suffer from endogenous reactivation of latent tuberculosis.

[0612] TNFR1, which primarily is involved in pro-inflammatory signaling, is the driving force in the development of arthritis. For example, knockout of TNFR1 in mice, as well as silencing of TNFR1 expression by RNA interference, results in the attenuation of collagen-induced arthritis (CIA), an animal model of arthritis. TNFR1 deficient mice that overexpress TNF are protected from the development of arthritis, and the reintroduction of TNFR1 on mesenchymal cells results in the development of TNF-dependent arthritis. Additionally, TNFR1 enhances the generation of osteoclasts, resulting in local bone destruction, and it has been shown that the lack of TNFR1 on hematopoietic cells attenuates bone destruction in a model of erosive arthritis. TNFR1 also has been associated with cardiotoxic effects in TNF-induced models of heart failure and myocardial infarction, and has been shown to promote neurodegeneration in an animal model of retinal ischemia (see, e.g., Schmidt et al. (2013) Arthritis & Rheumatism 65(9):2262-2273; Goodall et al. (2015) PLoS ONE 10(9):e0137065; McCann et al. (2014) Arthritis & Rheumatology 66(10):2728-2738; Ruspi et al. (2014) Cellular Signaling 26:683-690; Faustman and Davis (2013) Front. Immunol. 4:478; Blüml et al. (2012) International Immunology 24(5):275-281; Dong et al. (2016) Proc. Natl. Acad. Sci. USA 113(43):12304-12309).

b. TNFR2

[0613] Human TNFR2 (see, SEQ ID NO:4) contains 461 amino acid residues; residues 1-22 correspond to the signal peptide, residues 23-257 correspond to the extracellular domain, residues 258-287 correspond to the transmembrane domain, and residues 288-461 correspond to the cytoplasmic domain. TNFR2, which, unlike TNFR1, lacks a death domain, has a TNF receptor-associated factor 2 (TRAF2) binding site. TNFR2 signaling via TRAF2 promotes cell survival and proliferation through NF-κB and activator protein 1 (AP1) activation, and has been associated with PI3K-PKB/Akt-mediated repair and migration. As discussed elsewhere herein, TNF signaling via TNFR2 also promotes the expansion and activation of regulatory T cells (Tregs), which play an important role in the suppression of inflammatory and autoimmune diseases and disorders. TNFR2 signaling has been implicated in repair and regeneration in models of wound healing and myocardial infarction, while knockout of TNFR2 in a mouse model of erosive arthritis results in joint inflammation and bone destruction.

[0614] TNFR2, which primarily is involved in anti-inflammatory signaling, has been associated with neuro-, cardio-, gut- and osteo-protective effects. TNFR2 exhibits anti-inflammatory and protective effects; these effects have been demonstrated, for example, in experimental autoimmune encephalomyelitis (EAE), experimental colitis, heart failure/heart disease, myocardial infarction, inflammatory arthritis, demyelinating and neurodegenerative disorders, and infectious disease. For example, activation of TNFR2 by TNF inhibits seizures, attenuates cognitive dysfunction following brain injury, promotes survival following myocardial infarction in mice, protects against myocardial ischemia/reperfusion injury, and reduces remodeling and hypertrophy following heart failure. TNFR2 agonism also is associated with pancreatic regeneration, remyelination, survival of neuron subtypes, and stem cell proliferation. TNFR2 agonism selectively destroys autoreactive T cells, but not healthy cells, in blood samples from patients with type I diabetes, multiple sclerosis, Graves' disease and Sjogren's syndrome. In animal models of type I diabetes, elimination of autoreactive T cells using low-dose TNF results in the regeneration of pancreatic tissue. TNF signaling through TNFR2 has been shown to induce regeneration of oligodendrocyte precursors in myelin, and thus, can be of use for the treatment of demyelinating disorders, such as multiple sclerosis (MS). TNFR2 also has been shown to promote neuroprotection in an animal model of retinal ischemia.

[0615] TNFR2 also regulates osteoclastogenesis. Osteoclasts are a type of bone cells that break down bone tissue; the regulation of osteoclastogenesis is important for maintaining bone mass, and protecting against joint inflammation and erosive destruction. Mice lacking TNFR2 display enhanced osteoclastogenesis, worsening TNF-driven arthritis, and local bone destruction. The lack of TNFR2 in an animal model of erosive arthritis results in disease progression, and TNFR2-deficient mice overexpressing TNF develop aggravated arthritis and joint destruction compared with control mice. Expression of TNFR2 on hematopoietic cells attenuates TNF-driven arthritis, while the loss of TNFR2 on hematopoietic cells increases the recruitment of inflammatory cells to the synovial membrane. In experimental colitis, the lack of TNFR2 expression on CD4⁺ T cells accelerates the onset of disease and increases the severity of inflammation, while in experimental autoimmune encephalitis (EAE), symptoms are exacerbated in TNFR2-deficient mice (see, e.g., Schmidt et al. (2013) Arthritis & Rheumatism 65(9):2262-2273; Goodall et al. (2015) PLoS ONE 10(9):e0137065; McCann et al. (2014) Arthritis & Rheumatology 66(10):2728-2738; Ruspi et al. (2014) Cellular Signaling 26:683-690; Faustman and Davis (2013) Front. Immunol. 4:478; Blüml et al. (2012) International Immunology 24(5):275-281; Dong et al. (2016) Proc. Natl. Acad. Sci. USA 113(43):12304-12309). Polymorphisms in the TNFR2 gene are correlated with a variety of autoimmune diseases, including, for example, RA, Crohn's disease, systemic lupus erythematosus, ankylosing spondylitis, inflammatory bowel disease, ulcerative colitis and scleroderma; the polymorphisms hinder the binding of TNF to TNFR2, which limits activation of NF-κB and hampers TNFR2 signaling pathways in Tregs (see, e.g., Yang et al. (2018) Front. Immunol. 9:784).

[0616] TNFR1 contains an intracellular death domain and can activate apoptotic and/or inflammatory pathways, while TNFR2 binds TRAFs and can activate the canonical and non-canonical NF-κB pathways to control cell survival and proliferation. In general, cells that express TNFR2 also express TNFR1, at varying ratios, depending on the cell type and function. Since TNFR1 signaling generally induces cell death, whereas TNFR2 signaling generally induces cell survival, the ratio of their co-expression on cells shifts the balance towards apoptosis or cell survival. As discussed above and elsewhere herein, it has been shown that TNFR1 is the primary TNF receptor involved in the pathogenesis of RA, while TNFR2 plays an immunoregulatory role. Both receptors, however, are involved in mediating the antiviral activity of TNF. Animal disease models, for example, show that TNFR1 is associated with inflammatory neurodegeneration, while TNFR2 is associated with neuroprotection.

[0617] The selective inhibition of TNFR1, or the selective activation of TNFR2, has been demonstrated in a mouse model of NMDA-induced acute neurodegeneration, by administration of either ATROSAB (Antagonistic TNF Receptor One-Specific Antibody), a TNFR1-selective antagonistic IgG1 antibody, or EHD2-scTNF_{R2}, an agonistic TNFR2-selective TNF mutein (i.e., mutated protein). EHD2-scTNF_{R2} contains a covalently stabilized human TNFR2-selective single-chain TNF trimer with the mutations D143N/A145R (residue numbering with respect to soluble TNF as set forth in SEQ ID NO:2, and corresponding to D219N and A221R, respectively, with respect to SEQ ID NO:1; these mutations abrogate affinity for TNFR1), fused to the dimerization domain EHD2, which is derived from the heavy chain C_{H}2 domain of IgE and creates a disulfide bonded dimer that contains hexameric TNF domains. Simultaneous injection of NMDA and ATROSAB, or NMDA and EHD2-scTNFR₂, into the nucleus basalis magnocellularis results in significant but incomplete neuroprotective effects compared with controls, in an in vivo mouse model. The incomplete nature of these responses was due to the agonistic activity of ATROSAB, a byproduct of the bivalent antibody inducing aberrant receptor clustering and activation (Richter et al. (2013) PLoS One 8(8):e72156). Similarly, the EHD2-scTNFR2 is immunogenic in humans because of its multiple fusion partners, and an immune response to the IgE fragments result in an autoimmune reaction in toxicology studies (see, e.g., Weeratna et al. (2016) Immun. Inflamm. Dis. 4(2):135-147). Therefore, improved TNFR1 antagonists and improved TNFR2 agonists are needed that overcome these limitations.

### 3. Regulatory T Cells (Tregs) and Their Role in the Autoimmune Microenvironment

[0618] Regulatory T cells (Treg cells or Tregs) are an immunosuppressive subpopulation of T cells with immunosuppressive properties via production of cytokines. These include transforming growth factor beta, interleukin 35, and interleukin 10. Induction of Treg function can inhibit several pathologies. Induction can enhance success of transplantation, suppress allergy, control responses, such as severe acute respiratory syndrome, to infectious disease and autoimmunity. Tregs suppress and/or downregulate the induction and proliferation of effector T cells (Teffs), modulate the immune system, maintain immune homeostasis and tolerance to self-antigens, and can prevent the development of autoimmune disease and tissue destruction. Tregs express, among other markers, CD4, CTLA-4, CD25 (also known as IL-2 receptor alpha chain or IL2RA), and FOXP3 (transcription factor forkhead box P3), and express TNFR2 at a tenfold higher density than they express TNFR1. TNFR2 is expressed by only a subpopulation of Tregs, which is the maximally suppressive subset; this subset contains TNFR2-expressing CD4⁺FoxP3⁺ Tregs. TNF, via TNFR2 signaling, promotes Treg cell proliferation, up-regulation of FoxP3 expression, and Treg cell suppressive activity/function. The autoimmune microenvironment contains more autoreactive CD8⁺effector T cells than immunosuppressive CD4⁺Tregs, resulting in tissue destruction. As a result, preservation of TNFR2 function, or enhanced TNFR2 function, which expands Tregs and eliminates autoreactive T cells, restores the immune balance (see, Sharma et al. (2018) Front Immunol. 9:883). For these reasons, and others described below, pharmacological retention of Treg function by selective inhibition of TNFR1, possibly together with TNFR2 stimulation (agonism), would improve outcomes in many acute and chronic inflammatory conditions (severe acute respiratory syndrome, autoimmune diseases).

[0619] In addition to up-regulating the expression of TNFR2 on Tregs, TNF also up-regulates the Treg surface expression of other co-stimulatory members of the TNF receptor superfamily (TNFRSF), such as 4-1BB and OX40, result in the optimal activation and proliferation of Tregs, and in the attenuation of excessive inflammatory responses. Neutralization of TNF (blocking TNFR2) blocks in vivo expansion of Tregs (e.g., Hamano et al. (2011) Eur. J. Immunol. 41:2010-2020).

[0620] In comparison to CD4⁺FoxP3⁺ conventional T cells, CD4⁺FoxP3⁺Tregs constitutively express TNFR2, promoting Treg cell activation, expansion and survival. TNF signaling through TNFR2 (i.e., TNFR2 agonism) promotes the activation and expansion of Tregs, while TNFR2 antagonism results in Treg contraction. For example, TNFR2 agonism selectively kills autoreactive T cells and expands suppressive Tregs in humans with autoimmune disease, and in animal models of autoimmunity. TNFR2 signaling promotes Treg cell expansion and suppressive activity in experimental autoimmune encephalomyelitis (EAE; an animal model of inflammatory CNS demyelinating disease, e.g., multiple sclerosis), and in a murine model of diabetes, and induces human antigen-specific Treg cells by tolerogenic dendritic cells. TNFR2-deficient Tregs are reduced in their ability to prevent experimental colitis in vivo, and TNFR2 is required for sustained FoxP3 expression on Tregs, and as a result, for maintaining the phenotypic and functional stability of Tregs, indicating that TNFR2 is required for the in vivo immunosuppressive function of Tregs (see, e.g., McCann et al. (2014) Arthritis & Rheumatology 66(10):2728-2738; Faustman and Davis (2013) Front. Immunol. 4:478; Schmidt et al. (2013) Arthritis & Rheumatism 65(9):2262-2273; Vanamee et al. (2017) Trends in Molecular Medicine 23(11):P1037-P1046; Chen et al. (2013) J. Immunol. 190(3):1076-1084). In one study, in vitro produced antigen-specific Tregs were shown to suppress disease and reduce joint inflammation and bone destruction in a well-established antigen-induced arthritis (AIA) model, in which mice are immunized with methylated bovine serum albumin (mBSA) to induce T cell-mediated tissue damage (see, e.g., Wright et al. (2009) Proc. Natl. Acad. Sci. USA 106(45):19078-19083). Using Tregs in cellular therapy, while promising, due to manufacturing and other complications, a traditional biologic therapeutic that provides the advantages of Tregs without the complications is needed.

[0621] As described and provided herein, TNFR2, and its expression by Tregs, is required for the suppression of inflammatory and autoimmune diseases and conditions. For example, the Mycobacterium bovis bacillus Calmetter-Guerin (BCG) induces transient expansion of Tregs. In a clinical trial, BCG triggered Treg production in patients with type I diabetes, resulting in suppression of disease and temporary restoration of islet cell function, indicating a use of Tregs and/or modulators that enhance Treg function in the treatment of type I diabetes (see, e.g., Spence et al. (2016) Curr Diab Rep 16(11):110. doi: 10.1007/s11892-016-0807-6).

[0622] It is described and established herein that modulation of Treg function presents a therapeutic approach for the prevention or treatment of inflammatory and autoimmune diseases and conditions. Tregs, however, only constitute~1-5% of total CD4⁺ T cells in the blood. Their low numbers hinder their clinical use. Ex vivo generation of Tregs, and/or stimulation of their production in vivo, is factor that limits their therapeutic use. For example, in vivo stimulation with IL-2, anti-CD3, or anti-CD28 is too toxic, while ex vivo stimulation using these agents generates heterogeneous CD4⁺populations that can release proinflammatory cytokines and have antagonistic properties. Alternative approaches have used TL1A-Ig, a naturally occurring TNF receptor superfamily agonist, or TNFR2 monoclonal antibody agonists, to expand Tregs in vivo and ex vivo, respectively. A TNFR2 agonist construct, and the multi-specific constructs, provided herein can preserve and/or expand the Treg population in vivo without interfering with the therapeutic activity of anti-TNFR1 activity. As described and provided herein, selective inhibition of inflammatory TNFR1 activity, while maintaining or increasing TNFR2-associated Treg suppressive activity, is beneficial in the treatment of inflammatory and autoimmune diseases and conditions. These diseases and conditions include, but are not limited to, RA, type I diabetes, heart failure and multiple sclerosis (see, e.g., Goodall et al. (2015) PLoS ONE 10(9):e0137065).

[0623] In a tumor microenvironment (TME), in contrast to an autoimmune microenvironment in which the expansion of TNFR2⁺Tregs prevents tissue destruction, tumors are infiltrated by large numbers of immunosuppressive TNFR2⁺Tregs, which prevent the proliferation of tumor-killing CD8⁺cytotoxic T lymphocytes (CTLs), also known as effector T cells (Teffs), allowing for tumor growth. Antagonism of TNFR2 on lymphocytes in the TME restores the balance between the two types of T cells, by inhibiting or eliminating Tregs and allowing for the activation and expansion of effector T cells, a condition where tumor growth can be controlled or reversed. To be useful as a therapeutic, the TNFR2 inhibitor must not have the ability to aggregate immune cells via ADCC for two reasons: 1) aggregation transiently leads to ‘super-induction’ of TNFR2 mediated immunosuppression; and 2) eventually leads to systemic depletion of Tregs, which will be detrimental to the patient because it is essential to retain a basal level of Treg activity to maintain immune homeostasis. Tumor cells and myeloid-derived suppressor cells (MDSCs) also express TNFR2, and inhibition of TNFR2 in MDSCs control metastasis, as shown in a murine liver cancer model. Thus, blockade of TNFR2, such as through the use of non-aggregating antagonistic antibodies or other therapeutics, as provided herein, presents a useful treatment for certain types of cancers via the inhibition of immunosuppressive Tregs. TNFR2 antagonists, however, only should be administered to patients whose tumors show overexpression of TNFR2 compared to adjacent normal tissue as judged from immunohistochemistry. Thus, such treatment should be accompanied by diagnostics to confirm overexpression (see e.g., Zhang et al. (2019) Thorac Cancer 10(3):437-444. doi:10.1111/1759-7714.12948; Yang et al. (2017) Oncol Lett.14(2):2393-2398. doi:10.3892/ol.2017.6410; and Yang et al. (2018) Oncol Lett. 16(3):2971-2978. doi:10.3892/ol.2018.8998, for exemplary assays).

4. Autoimmune/Inflammatory Diseases Mediated by or involving TNF

[0624] Elevated levels or uncontrolled expression of TNF and deregulation of TNF signaling can cause chronic inflammation, which can result in the development of autoimmune diseases and tissue damage. TNF-α is involved in numerous diseases, disorders, and conditions. Constructs provided herein can be used for treatment of such diseases, disorders, and conditions. The following discussion describes some exemplary diseases, disorders, and conditions in which blocking TNF can have a therapeutic effect. TNF blockers, such as etanercept, infliximab, adalimumab, certolizumab and Golimumab, have adverse side effects that can limit their use for treatment of such diseases, disorders, and conditions. The constructs provided herein, which avoid some or all of these adverse effects, can be used to treat these diseases, disorders, and conditions (see, e.g., Lis et al. (2014) Arch Med Sci. 10(6):1175-1185 for a review of the role of TNF in disease and the use of TNF blockers for treatment thereof).

[0625] Inflammatory diseases include an array of disorders and conditions that are characterized by inflammation, and include autoimmune diseases. The immune system protects the body by producing antibodies and/or activating lymphocytes in response to invading microorganisms, such as viruses and bacteria. In healthy individuals, the immune system does not trigger a response against the body's own (i.e., “self”) cells; autoimmune diseases occur when the immune system attacks healthy, non-invading, self, cells and tissues. Autoimmune/inflammatory diseases and disorders associated with elevated TNF levels include, for example, arthritis (e.g., rheumatoid arthritis, psoriatic arthritis, juvenile idiopathic arthritis, spondyloarthritis), inflammatory bowel disease (e.g., Crohn's disease and ulcerative colitis), uveitis, fibrotic diseases, endometriosis, lupus, ankylosing spondylitis, psoriasis, multiple sclerosis (MS), Parkinson's disease, and Alzheimer's disease, among others. Exemplary autoimmune and inflammatory diseases and disorders, that can be treated with the constructs provided herein, are discussed below.

a. Arthritis

### Rheumatoid Arthritis and Other Types of Arthritis

[0626] Rheumatoid arthritis (RA) is a chronic autoimmune inflammatory disease. The inflammation associated with rheumatoid arthritis affects the linings of the joints (i.e., the synovial lining), and also the membranes lining the blood vessels, heart and also can become inflamed. RA is characterized by the infiltration of immune cells (e.g., activated B cells) into the synovial membrane and synovial cell proliferation, which results in the thickening of the synovial lining. The proliferative mass, known as the pannus, invades and destroys cartilage and bone, irreversibly destroying joint structure and function. This is mediated by the induction of proinflammatory cytokines, such as TNF, IL-1 and IL-6. Tumor necrosis factor a (TNF-α) is a key modulator of the induction and perpetuation of the proinflammatory activities that are associated with RA. TNF is over-expressed in synovial fluids and in the synovial membrane, and expression of TNFRs is up-regulated in the synovial membrane (see, e.g., Blüml et al. (2012) International Immunology 24(5):275-281; Schmidt et al. (2013) Arthritis & Rheumatism 65(9):2262-2273; Keffer et al. (1991) EMBO J. 10(13):4025-4031). Other types of arthritis that can be treated with constructs herein, include, for example, psoriatic arthritis, juvenile idiopathic arthritis, and spondyloarthritis.

b. Inflammatory Bowel Disease (IBD) and Uveitis

[0627] Inflammatory bowel disease (IBD) includes Crohn's disease and ulcerative colitis, which are inflammatory diseases of the intestine and colon. Mice overexpressing TNF develop intestinal inflammation that resembles Crohn's disease, while TNFR1 deficiency protects against Crohn's disease (see, e.g., Fischer et al. (2015) Antibodies 4:48-70).

[0628] Uveitis is a form of eye inflammation that affects the eye wall (uvea), the middle layer of the eye between the retina and the sclera (white of the eye), and can lead to vision loss. TNF-α is involved in its pathophysiology, and TNF blockers have been used for treatment.

c. Fibrotic Diseases

[0629] Constructs herein can be used for treatment of fibrotic diseases. Dupuytren's disease is exemplary of such diseases. Dupuytren's disease (DD) is a common fibrotic condition of the hands that is characterized by irreversible flexion contractures of the fingers; the condition is limited to the palm of the hand and causes irreversible curling in of the fingers, severely compromising hand function. There are no approved therapies for early stage disease, which manifests as nodules that are quiescent for some time and that then become active and progress to cords and flexion deformities of the fingers, resulting in the loss of hand function. Treatment involves surgical excision (fasciotomy) of the diseased tissue or cords, or disruption of the cords using collagenase or needle fasciotomy. The surgical and non-surgical treatments have high rates of recurrence and complications. Therapeutic intervention at the early stages of disease, to prevent progression to cord development and the subsequent flexion contractures of the digits, is advantageous (see, e.g., Nanchahal et al. (2018) EBioMedicine 33:282-288).

[0630] Myofibroblasts, which express the contractile protein a-smooth muscle actin (α-SMA) and aggregate in nodules, deposit excessive collagenous extracellular matrix and are responsible for its remodeling and contraction in all fibrotic conditions, including DD. TNF converts palmar fibroblasts into myofibroblasts in patients with DD, via the Wnt signaling pathway, and DD myofibroblasts exhibit a dose-dependent reduction in contractility and reduction in the expression of a-SMA and pro-collagen, following treatment with anti-TNF therapies. Treatment with the fully humanized IgG mAbs adalimumab and golimumab have been the most effective. The use of anti-TNF therapies, such as adalimumab, however, is associated with an increased risk of infection, and in a phase 2a trial evaluating the therapeutic efficacy of adalimumab in DD, 1 patient (out of 21 receiving adalimumab) developed a wound infection requiring hospitalization (see, e.g., Nanchahal et al. (2018) EBioMedicine 33:282-288). Thus, other therapies are needed.

d. Tumor Necrosis Factor Receptor-Associated Periodic Syndrome (TRAPS)

[0631] Tumor necrosis factor receptor-associated periodic syndrome (TRAPS) is the second most common inherited autosomal dominant auto-inflammatory disease, and is caused by mutations in the TNFRSF1A gene, encoding TNFR1. TRAPS is characterized by unprovoked, periodic long-lasting fever, systemic inflammation, abdominal pain, skin lesions, conjunctivitis, myalgia and pericarditis, with inflammatory attacks lasting up to several weeks. A complication associated with more severe clinical phenotypes of TRAPS is AA-type serum amyloidosis, which can result in renal impairment and failure. Disease onset typically occurs in early childhood, but TRAPS can present in adults as well. The majority of TRAPS-associated mutations occur in the extracellular domain of TNFR1, which is involved in ligand binding. High-penetrance mutations, which are associated with the most severe clinical phenotype, occur in the extracellular cysteine-rich domains (CRDs). The mutations affect the folding and secondary structure of TNFR1, which can result in defective TNFR1 trafficking, altered ligand binding affinity, reduced activation-induced shedding and impaired cell signaling. For example, ligand-independent gain-of-function of TNFR1 induces TRAPS pathophysiology, and certain mutations result in the constitutive activity of TNFR1, NF-κB and caspase 1. Traditional anti-TNF therapies, including etanercept, infliximab, and others, are only partially effective in the treatment of TRAPS (see, e.g., Greco et al. (2015) Arthritis Research & Therapy 17:93), and thus, other therapies are needed.

e. Other Diseases Mediated by or Involving TNF
i. Neurodegenerative Diseases

[0632] Aging and several neurodegenerative diseases are associated with elevated levels of TNF in the central nervous system (CNS). TNF is implicated in initiating and maintaining neuroinflammation, and in modulating other neurological processes, such as synaptic function and plasticity. The levels of TNFR1 in the hippocampus of aged rats is approximately 3-fold higher compared to the levels of TNFR2. In animal models of disease, TNF is implicated in chronic glial activation and impaired neuronal viability through its actions on TNFR1. In aged animals, neurologic changes include synaptic dysfunction and Ca²⁺ dysregulation, which can be replicated in healthy young animals and in neuronal cultures using artificial elevations in TNF. TNF also potentiates the activity of L-type voltage sensitive Ca²⁺ channels (L-VSCCs); a similar effect is observed in hippocampal neurons of memory impaired aged rats. Studies in rats have shown that TNF blockade in the cerebellum accelerates learning in a delayed eyeblink task. Selective blockade of TNFR1 signaling, using XPro1595, a soluble dominant negative TNF (DN-TNF) that preferentially inhibits TNFR1 signaling, resulted in improved behavioral performance on a Morris swim task, reduced microglial activation, prevention of hippocampal long-term depression (LTD), and reduced the activity of L-VSCCs in CA1 neurons. These results indicate that TNF signaling via TNFR1 is implicated in modifying the neurologic phenotype of aged animals, and can result in pathological changes associated with neurological diseases (see, e.g., Sama et al. (2012) PLoS ONE 7(5):e38170).

### a) Alzheimer's Disease

[0633] TNF is a central player in inflammatory responses; TNF protein levels are low in healthy brain but chronically elevated in many neuroinflammatory diseases, including Alzheimer's disease (AD). In animal models of AD, TNF promotes microglial activation, synaptic dysfunction, neuronal cell death, accumulation of plaques and tangles, and cognitive decline. For example, in a triple transgenic AD mouse model (3×Tg-Ad), with mutations in presenilin 1, amyloid precursor protein (APP) and tau, TNF levels were elevated in entorhinal cortex, coincident with the earliest appearance of pathology (see, e.g., McCoy et al. (2006) J. Neurosci. 26(37):9365-9375). TNF-driven processes are implicated in AD pathology and contribute to cognitive dysfunction and accelerated progression of AD. The bacterial endotoxin lipopolysaccharide (LPS), which induces inflammation and the production of TNF, accelerates the appearance and severity of AD pathology in several animal models of AD. The overproduction of proinflammatory mediators, including TNF, occurs in the brain when microglia, which are often in close physical association with amyloid plaques in AD brains, become chronically activated. Elevated levels of TNF inhibit phagocytosis of amyloid beta (Aβ) in the brains of AD patients, which hinders efficient plaque removal by microglia. The chronic inhibition of solTNF by administering a DN-TNF, such as XENP345, or a lentivirus encoding the DN-TNF, prevented the acceleration of AD-like pathology induced by chronic systemic inflammation in an animal model of AD (3×TgAD mice), and decreased the LPS-induced intraneuronal accumulation of 6E10-immunoreactive protein, particularly C-terminal amyloid precursor protein (APP) fragments (β-CTF), in the hippocampus, cortex and amygdala. Genetic deletion of TNFR1 in 3×TgAD mice also prevents the LPS-induced accumulation of 3-CTF, which is neurotoxic. Neuronal cells bearing familial AD (FAD) mutations accumulate 3-CTF intracellularly, implicating its involvement in the pathogenesis of AD. These results indicate that soluble TNF is a mediator of the effects of neuroinflammation on early, pre-plaque pathology in 3×TgAD mice, and that targeted inhibition of solTNF in the central nervous system (CNS) can slow the appearance of amyloid-associated pathology, cognitive deficits, and the progressive loss of neurons in AD (see, e.g., McAlpine et al. (2009) Neurobiol. Dis. 34(1):163-177).

### b) Parkinson's Disease

[0634] Parkinson's disease (PD) is the second most prevalent neurodegenerative disease in the United States, with an incidence of 5% in individuals over 65 years of age. The clinical manifestations of Parkinson's disease result from the selective loss of dopaminergic neurons in the ventral mesencephalon substantia nigra pars compacta (SNpc), which results in a decrease in striatal dopamine. The cerebrospinal fluid (CSF) and postmortem brains of patients with PD and animal models of PD show elevated levels of TNF. A cohort of early-onset PD patients in Japan showed an increased frequency of a polymorphic allele (-1031C) in the TNF gene promoter that results in higher transcriptional activity and elevated TNF levels. TNFR1 is highly expressed in nigrostriatal dopaminergic neurons, which increases vulnerability to TNF-induced neuroinflammation and dopaminergic neuron toxicity. The in vivo neutralization of soluble TNF (solTNF) by a dominant-negative TNF mutein (XENP345) was neuroprotective, and reduced the retrograde nigral degeneration induced by a striatal injection of the oxidative neurotoxin 6-hydroxydopamine (6-OHDA) by 50% and attenuated amphetamine-induced rotational behavior in rats, indicating preservation of striatal dopamine levels. Delayed administration of XENP345 in embryonic rat midbrain neuron/glia cell cultures exposed to lipopolysaccharide (LPS) prevented the degeneration of dopaminergic neurons, despite sustained microglia activation and secretion of solTNF. XENP345 also attenuated 6-OHDA-induced dopaminergic neuron toxicity in vitro. TNF, thus, is implicated in the development of Parkinson's disease, and it may be possible to delay the progressive degeneration of the nigrostriatal pathway in humans by using TNF-blocking therapeutics, particularly in the early stages of Parkinson's disease (see, e.g., McCoy et al. (2006) J. Neurosci. 26(37):9365-9375).

### c) Multiple Sclerosis (MS)

[0635] CNS-specific overexpression of TNF in transgenic mice results in spontaneous demyelination, which is indicative of a role of TNF in multiple sclerosis (MS). A polymorphism in the gene encoding TNFR1 is linked to an increased susceptibility of developing MS. TNFR1 is necessary for the disease induction of experimental autoimmune encephalomyelitis (EAE), an animal model of MS, and TNFR2 deficiency worsens the disease. Mice expressing non-cleavable membrane-bound TNF are protected against EAE, indicating that the interaction of soluble TNF with TNFR1 is associated with disease pathology (see, e.g., Fischer et al. (2015) Antibodies 4:48-70).

ii. Endometriosis

[0636] TNF-α has been implicated in the pathophysiology of endometriosis. TNF-α levels are increased in peritoneal fluid of women with endometriosis, and the levels correlate with severity of disease (see, e.g., Koninckx (2008) Hum Reprod. 23: 2017-2023). Peritoneal fluid TNF-α is produced locally by activated peritoneal macrophages, and TNF-α induces IL-8 secretion by peritoneal mesothelial cells. The peritoneal fluid concentrations of TNF-α and IL-8 correlate with the size and the number of active peritoneal lesions (Bullimore, (2003) Med Hypotheses. 60:84-88). Serum TNF-α levels are increased, and monocytes from patients with endometriosis release more TNF-α in vitro compared with monocytes from controls. Peritoneal fluid levels of MCP-1 are increased in patients with endometriosis. TNF-α, IL-8 and MCP-1 drive an inflammatory Th-1 type response in the peritoneal fluid of patients with endometriosis. TNF-α mediated inflammation may be a causal factor in the pain associated with endometriosis. Blocking TNF-α appears to inhibit the development of the disease in animal models, and may be effective for humans. Because of the adverse side effects of existing TNF blockers, treatment of endometriosis with such blockers has not been recommended (see, Koninckx (2008) Hum Reprod. 23: 2017-2023). Constructs provided herein, however, are designed to avoid the deleterious effects, and can be considered for treating TNF-α mediated inflammation in endometriosis.

iii. Cardiovascular Disease

[0637] TNF-α was the first cytokine to be identified in human atherosclerotic plaque; TNF-α is involved in the activation of the endothelium and upregulation of adhesion molecules, which occur early in the development of atherosclerotic disease. TNF also is implicated in the pathogenesis of atherosclerosis by affecting lipid metabolism and inducing vascular inflammation. The blockade of TNF-α by TNF binding protein, or IL-1 by an IL-1 receptor antagonist, partially protects apoE knockout mice from atherosclerosis. Atherogenesis primarily is the result of the production of TNF-α by myeloid cells. The plaque area in apoE^{-/-} and TNF^{-/-} mice on a high fat diet is half the size of the plaque area in mice that are apoE^{-/-}. Transplantation of bone marrow from apoE^{-/-} and TNF^{-/-} mice, into apoE^{-/-} mice, reduced atherosclerotic lesion size by 83%. Atherosclerotic lesion size also was reduced following treatment of apoE^{-/-} mice with a recombinant soluble p55 (TNFR1) TNF blocker, indicating the role that TNF plays in atherosclerosis. NF-κB signaling is involved in the production of TNF-α in human atherosclerotic plaques. The peripheral blood levels of TNF-α in patients with cardiovascular disease also is correlated with the development of myocardial infarction. Cardiotoxicity primarily is attributed to TNF-induced cardiomyocyte apoptosis. The use of anti-TNF therapies, such as infliximab and etanercept, in clinical trials for the treatment of heart failure failed, and resulted in increased mortality; anti-TNF therapies have thus not been tested for the treatment of cardiovascular disease (see, e.g., Udalova et al. (2016) Microbial Spectrum 4(4):MCHD-0022-2015; Kalliolias and Ivashkiv (2016) Nat. Rev. Rheumatol. 12(1):49-62). As a result, alternative therapies are required.

iv. Acute Respiratory Distress Syndrome (ARDS)

[0638] Acute respiratory distress syndrome (ARDS) affects approximately 190,000 patients per year in the U.S. and has mortality rates of up to 40%. There are no effective therapeutics targeting the underlying pathophysiological mechanisms of ARDS. ARDS is characterized by immune cell-mediated lung injury, which is associated with the release of inflammatory cytokines and proteases. The uncontrolled local inflammatory response in ARDS results in damage to the alveolar-capillary barrier, and non-cardiogenic pulmonary edema. Pulmonary neutrophil recruitment, which is central to the pathogenesis of ARDS, is mediated by the interaction of primed and activated neutrophils with the lung microvascular endothelium, and is increased by damage to the alveolar-capillary barrier caused by the action of proinflammatory mediators. TNF-α has been identified as a key effector molecule in ARDS, as well as in sepsis, which is a common cause of ARDS. For example, TNF-α contributes to increased endothelial permeability. Clinical trials involving the administration of non-selective anti-TNF antibodies for the treatment of sepsis have failed to demonstrate any survival benefit, and one trial indicated that higher doses were harmful.

[0639] TNFR1-deficient mice are protected from lung injury, sepsis and other acute organ injuries, while TNFR2-deficient mice are more susceptible to injury in these models, indicating that selective antagonism of TNFR1 can be therapeutically effective. GSK1995057, a short-acting, fully human domain antibody (dAb) fragment that selectively antagonizes TNFR1, but not TNFR2, attenuated disease severity in a murine model of acute respiratory distress syndrome, and attenuated inflammation and signs of lung injury in non-human primates. In a randomized, placebo-controlled trial of nebulized GSK1995057 in 37 healthy humans challenged with a low dose of inhaled endotoxin, treatment with GSK1995057 attenuated pulmonary neutrophilia, inflammatory cytokine release, and signs of endothelial injury in bronchoalveolar lavage and serum samples. These results indicate the potential for pulmonary delivery of selective TNFR1 antagonists for the prevention and treatment of ARDS (see, e.g., Proudfoot et al. (2018) Thorax 73:723-730).

v. Severe Acute Respiratory Syndrome (SARS) and COVID-19

[0640] Subjects infected with severe acute respiratory syndrome coronavirus (SARS-CoV) present with fever and respiratory illness, general malaise and lower respiratory tract symptoms, including cough and shortness of breath, with an overall fatality rate of ~10%. TNF signaling promotes pathogenesis of SARS, by inducing excessive inflammation, which causes significant tissue damage. The development of a cytokine release syndrome (CRS) plays a role in severe COVID-19, the disease caused by severe acute respiratory syndrome coronavirus 2 (SARS-CoV-2). The persistent viral stimulation results, in some subjects in an increase in the levels of circulating cytokines, such as IL-6 and TNF-α, which leads to reduced lymphocyte counts and triggers inflammatory organ damage, particularly to the lungs, and blood vessels. SARS-CoV-2 shares several similarities with SARS-CoV, the strain of coronavirus responsible for the SARS pandemic of 2002. SARS-CoV and SARS-CoV-2 use the spike (S)-proteins to engage their cellular receptor, ACE2 (angiotensin-converting enzyme 2), for invading cells. The expression of the ACE2 receptor is upregulated by SARS-CoV-2 infection and by inflammatory cytokine stimulation. In SARS-CoV infection, S-proteins induce the TNF-α-converting enzyme (TACE)-dependent shedding of the ACE2 ectodomain, which is a process that is strictly coupled to TNF-a production. The loss of ACE2 activity due to shedding is associated with lung injury due to an increased activity of the renin-angiotensin system. ACE2 knockout mice are susceptible to severe respiratory failure following chemical challenge, and ACE2 has been shown to moderate ACE-induced intracellular inflammation. ACE2 downregulation is linked to the severe respiratory distress associated with SARS-CoV infection. Increased TNF-α production can thus facilitate viral infection and result in organ damage, such as lung injury.

[0641] As discussed, regulatory T cells (Tregs) are a type of immunosuppressive cell that display diverse clinical applications in transplantation, allergy, infectious disease, GVHD, autoimmunity, and cancer. Tregs co-express CD4⁺ and the interleukin-2 receptor alpha chain CD25^{hi} and feature inducible levels of intracellular transcription factor forkhead box P3 (FOXP3). Naturally-occurring Tregs express TNFR2 at a higher density than TNFR1. TNF signaling through TNFR2 promotes Treg activity: TNF-mediated TNFR2 activates and induces proliferation of Tregs (100) and TNFR2 expression indicates maximally suppressive Tregs Thus, in the case when TNF is being overproduced in response to an infection (influenzas, SARS type viruses, endotoxemia) Treg's can prevent overreaction to inflammatory stimuli.

[0642] Anti-TNF can be a treatment for SARS and COVID-19. Adalimumab is being used for treatment of COVID-19 (clinical trial China in February, 2020 (ChiCTR2000030089); see, e.g., Lucchino et al. (2020) Rheumatology (Oxford) 59(6):1200-1203; Haga et al. (2008) Proc. Natl. Acad. Sci. U.S.A. 105:7809-7814). Knockout of TNFR2 in mice infected with SARS-CoV does not provide any protective effects; the double knockout of TNFR1 and TNFR2 protected infected mice from weight loss associated with infection (see, e.g., McDermott et al. (2016) BMC Systems Biology 10:93). These results indicate that TNF signaling through TNFR1 primarily contributes to the pathogenesis of SARS-CoV infection, by increasing proinflammatory processes, and that selective inhibition of TNFR1, rather than inhibition of TNF, is a better therapeutic approach. The constructs provided herein can be used to treat the acute inflammatory aspects of SARS and COVID-19. The constructs are used in combination with anti-infective agents; the constructs are used to suppress or ameliorate the acute effects of cytokine storm.

[0643] TNF-α inhibition reduces the severity of virally-induced lung diseases, such as those caused by respiratory syncytial virus (RSV) or influenza virus, in mice. The depletion of TNF using anti-TNF antibody in these mouse models reduced the pulmonary recruitment of inflammatory cells, reduced the production of proinflammatory cytokines (e.g., IFNγ, IL-4, IL-5, TNF) by T-cells, and reduced the severity of illness without interfering with viral clearance (see, e.g., Hussell et al. (2001) Eur. J. Immunol. 31:2566-2573). These results indicate that TNF inhibitors and TNF receptor antagonists can be beneficial in the treatment of human viral lung diseases, such as those caused by SARS-CoV and SARS-CoV2, by preventing or reducing TNF-induced immune activation and pulmonary injury.

[0644] Allogeneic hematopoietic stem cell transplantation is complicated by the development of non-infectious idiopathic pneumonia syndrome (IPS), an acute pulmonary dysfunction that resembles SARS pneumonia. Elevated levels of TNF-α have been found in the sera of patients who developed lung injury after allogeneic stem cell transplantation (SCT), and it has been shown that donor-derived alloreactive T-cells are associated with this process. In humans, anti-TNF therapy with etanercept is beneficial in the treatment of IPS after allogeneic stem cell transplantation. Recipients of allogeneic stem cell transplants are at high risk of developing bacterial and fungal infections, due to the immunoablative effects of SCT conditioning regimens, the requirement for long term use of immunosuppressive drugs to prevent or treat graft-vs-host disease (GvHD), and other SCT complications (including acute GvHD) that can impair host defenses (see, e.g., Yanik et al. (2002) Biol. Blood Marrow Transplant. 8:395-400). Other indications that can be treated by constructs provided herein include chemo brain, a condition experienced during and following chemotherapy, particularly women treated for breast cancer. Also, the treatments and constructs herein can be used to treat long COVID.

[0645] As a result, the use of selective TNFR1 antagonists, which preserves protective TNF signaling via TNFR2, and, unlike anti-TNF therapies, does not increase the risk of serious infections, provides a safer and more effective therapeutic option for the treatment, prevention or amelioration of virally- and non-virally-induced lung injury. The constructs provided herein, thus, are ideal therapeutics for these indications.

### D. Therapies for Rheumatoid Arthritis and Other Chronic Inflammatory and Autoimmune Diseases and Disorders

[0646] There is no cure for rheumatoid arthritis (RA), but treatments can improve symptoms and slow disease progression, for example, by minimizing pain and swelling, preventing bone deformity, and maintaining day-to-day functioning. The primary treatments for RA are disease-modifying anti-rheumatic drugs (DMARDs), which also are used for the treatment of other chronic inflammatory and autoimmune diseases and disorders, such as, for example, psoriasis, plaque psoriasis, psoriatic arthritis, juvenile idiopathic arthritis, ankylosing spondylitis, Behget's disease, inflammatory bowel disease (IBD; e.g., Crohn's disease and ulcerative colitis), multiple sclerosis, and lupus, as well as for the treatment of some cancers.

[0647] DMARDs are immunosuppressive and immunomodulatory agents that are classified as either conventional synthetic DMARDs (csDMARDs), or biological DMARDs (bDMARDs; e.g., antibodies and fusion proteins). Conventional synthetic DMARDs include, for example, methotrexate (MTX), a chemotherapy agent and immunosuppressant; hydroxychloroquine (HCQ; Plaquenil®), an anti-malarial agent; sulfasalazine (Azulfidine®), an anti-inflammatory drug; and leflunomide (Arava®), an immunosuppressant that inhibits dihydroorotate dehydrogenase. Biologic DMARDs include, for example, abatacept (Orencia®), a fusion protein that prevents T cell activation and contains the Fc region of IgG1 fused to the extracellular domain of CTLA-4; anakinra (sold, for example, under the trademark Kineret®), a recombinant human IL-1 receptor antagonist; rituximab (sold under trademarks, including Rituxan®, Truxima®, MabThera®), a chimeric monoclonal antibody against CD20, which induces apoptosis in CD20⁺cells, such as B cells; tocilizumab (atlizumab, Actemra®, RoActemra®), a humanized monoclonal antibody against the IL-6 receptor (IL-6R); corticosteroids; tofacitinib (Xeljanz®), a small molecule inhibitor of Janus kinase (JAK), a protein tyrosine kinase involved in mediating cytokine signaling; and TNF-inhibitors/anti-TNF agents, such as, for example, certolizumab pegol (Cimzia®), infliximab (Remicade®), adalimumab (Humira®), golimumab (Simponi®), and etanercept (Enbrel®). Combination therapy, particularly of methotrexate with a biological DMARD, is more effective than either therapy alone. Combination therapies also can include multiple csDMARDs and multiple csDMARDs with one biological DMARD. Due to the risk of serious side effects, including serious infections, multiple biological DMARDs, particularly anti-TNF DMARDs, typically are not used for combination therapy methods.

[0648] The following sections describe existing therapies, and the problems associated with each, to highlight how the therapies provided herein solve the problems.

1. Conventional Synthetic Disease Modifying Anti-Rheumatic Drugs (csDMARDs)

[0649] Conventional synthetic Disease Modifying Anti-Rheumatic Drugs (csDMARDs) are typically the first line treatment for RA and other autoimmune and chronic inflammatory diseases and disorders. csDMARDS include drugs such as methotrexate, leflunomide, hydroxychloroquine, and sulfasalazine, Methotrexate is the most commonly used agent for initial treatment, and its mechanism of action involves stimulating the release of adenosine from fibroblasts, reducing neutrophil adhesion, inhibiting leukotriene B4 synthesis by neutrophils, inhibiting local IL-1 production, reducing levels of IL-6 and IL-8, suppressing cell-mediated immunity, and inhibiting synovial collagenase gene expression. Other conventional synthetic DMARDs act by inhibiting the proliferation of lymphocytes or causing lymphocyte dysfunction. For example, leflunomide inhibits dihydroorotate dehydrogenase, resulting in inhibition of pyrimidine synthesis, and blocking lymphocyte proliferation. Sulfasalazine mediates its anti-inflammatory effects by preventing oxidative, nitrative and nitrosative damage, and hydroxychloroquine is a mild immunomodulatory agent that inhibits intracellular toll-like receptor 9 (TLR9).

[0650] Hydroxychloroquine, which has the best safety profile of conventional DMARDs, does not increase the risk of infections, and does not cause hepatotoxicity or renal dysfunction; common side effects of hydroxychloroquine include rash and diarrhea. Retinopathy/maculopathy is a rare but serious side effect of hydroxychloroquine therapy which is associated with doses of more than 5 mg/kg/day, long-term use (more than 5 years of therapy), older age and chronic kidney disease. Other rare adverse effects of hydroxychloroquine include anemia, leukopenia, myopathy, and cardiomyopathy. Therapy with methotrexate, leflunomide, and sulfasalazine is associated with nausea, abdominal pain, diarrhea, rash/allergic reaction, bone marrow suppression, hepatotoxicity and higher incidence of common and sometimes serious infections. Methotrexate and leflunomide also cause alopecia. Other side effects associated with methotrexate therapy include interstitial lung disease, folic acid deficiency, and liver cirrhosis. Leflunomide also is associated with hypertension, peripheral neuropathy, and weight loss. Sulfasalazine has a very high risk of gastrointestinal distress and can rarely cause DRESS syndrome (drug reaction with eosinophilia and systemic symptoms) (see, e.g., Benjamin et al. Disease Modifying Anti-Rheumatic Drugs (DMARD) [Updated 2020 Feb. 27]. In: StatPearls [Internet]. Treasure Island (FL): StatPearls Publishing; 2020 January Available from: URL:ncbi.nlm.nih.gov/books/NBK507863/). These drugs are effective because they are immunosuppressive. The constructs provided herein that are selective anti-TNFR1 antagonists that preserve TNFR2 immunosuppressive activity advantageously can avoid the need for these immunosuppressive drugs.

### 2. Anti-TNF Therapies/TNF Blockers

[0651] Anti-TNF therapies/TNF-blockers (a type of biological DMARD) typically are prescribed after the failure of conventional DMARDs, and include monoclonal antibodies (mAbs), such as the chimeric mAb infliximab (Remicade®); containing a murine variable region and a human IgG1 constant region, and the fully humanized mAbs (IgG1s) adalimumab (Humira®) and golimumab (Simponi®); the PEGylated humanized Fab′ fragment of a mAb targeting TNF, certolizumab pegol (Cimzia®); and TNFR2 fusion proteins, such as the TNFR2-Fc fusion protein etanercept (Enbrel®), which contains the extracellular receptor region that contains the binding site of human TNFR2 fused to the Fc of human IgG1. Remsima® and Inflectra® are biosimilars of infliximab that are approved for use in the European Union for the treatment of various autoimmune and chronic inflammatory diseases and disorders. These TNF inhibitors, which sequester TNF, are used for the treatment of various diseases and conditions, including, for example, RA, psoriasis, psoriatic arthritis, ankylosing spondylitis, juvenile idiopathic arthritis (JIA) and/or inflammatory bowel disease (IBD; e.g., Crohn's disease and ulcerative colitis).

[0652] Because of the immunosuppressive effects of therapies that target TNF, such therapies are associated with severe side effects, including, for example, an increased risk of sepsis and serious infections, such as listeriosis, reactivation of tuberculosis, reactivation of hepatitis B/C, reactivation of herpes zoster, and invasive fungal and other opportunistic infections. TNF is a key cytokine in the inflammatory and immune responses to infections, and the use of drugs that remove TNF impairs host immunity against microorganisms, increasing the risk of infection. For example, TNF blocking agents are associated with the reactivation of M. tuberculosis infection. TNF plays an important role in the resistance against Mycobacterium tuberculosis, and adalimumab therapy in RA patients significantly reduces reactivity against M. tuberculosis. As described herein, the reduced immune reactivity can be related to the activation of Tregs and the induction of apoptosis in effector lymphocytes. Anti-TNF therapy has been shown to induce macrophage apoptosis in the rheumatoid synovium. Infliximab is associated with increased apoptosis in the inflammatory cell infiltrate in the guts of patients with Crohn's disease. Other anti-rheumatic drugs, such as methotrexate and glucocorticoids, also can induce apoptosis in immune cells (see, e.g., Vigna-Perez et al. (2005) Clin. Exp. Immunol. 141(2):372-380). Adalimumab and infliximab, but not etanercept, a TNFR2-Fc fusion protein, induce caspase-dependent apoptosis in cultured monocytes, and downregulate the production of IL-10 and IL-12 by monocytes (see, e.g., Shen et al. (2005) Ailment Pharmacol. Ther. 21:251-258). The most prevalent fungal infections associated with TNF blockers are histoplasmosis, candidiasis, and aspergillosis. Anti-TNF agents also can cause worsening of severe congestive heart failure, drug-induced lupus, and demyelinating central nervous system (CNS) diseases, as well as lymphomas and non-melanoma skin cancers (see, e.g., Benjamin et al. Disease Modifying Anti-Rheumatic Drugs (DMARD) [Updated 2020 Feb. 27]. In: StatPearls [Internet]. Treasure Island (FL): StatPearls Publishing; 2020 January Available from: ncbi.nlm.nih.gov/books/NBK507863/).

[0653] Infliximab also has been associated with the development of leukopenia, neutropenia, thrombocytopenia, and pancytopenia (some fatal). etanercept has been associated with an increased incidence of opportunistic bacterial and viral infections in patients with RA. etanercept also is used to treat severe refractory graft-versus-host disease (GvHD). Subjects with severe GvHD who are treated with etanercept have a very high risk (100% in one study, see, Zoran et al. (2019) Sci. Rep. 9:17231) of developing invasive aspergillosis (IA), a life-threatening mold (i.e., fungal) infection caused by Aspergillus fumigatus. Treatment with etanercept results in the downregulation of genes involved in immune responses and TNF signaling, including genes involved in NF-κB signaling, anti-microbial humoral responses and apoptotic processes, as well as a decrease in the secretion of chemokines, such as CXCL10, from immune cells (see, e.g., Zoran et al. (2019) Sci. Rep. 9:17231).

[0654] Other side effects associated with the use of TNF blocking therapies include congestive heart failure, liver injury, demyelinating disease/CNS disorders, lupus, psoriasis, sarcoidosis, and an increased susceptibility to the development of additional autoimmune diseases, as well as cancers, including lymphomas and solid malignancies (see, e.g., Dong et al. (2016) Proc. Natl. Acad. Sci. USA 113(43):12304-12309; Zalevsky et al. (2007) J. Immunol. 179:1872-1883; Zoran et al. (2019) Sci. Rep. 9:17231). Thus, the abrogation of all TNF-mediated signaling, by sequestering TNF, is not an ideal therapeutic strategy, as it results in severe immunosuppression that can lead to serious, sometimes fatal, infections, and other dangerous side effects.

[0655] Anti-TNF therapies ameliorate RA but are not curative, and require years of continuous and costly therapy. The inhibition/blockade of TNF in RA reduces inflammation and joint destruction, but, as discussed above, is associated with an increased risk of serious infections, such as tuberculosis and listeriosis, due to immunosuppression. As a result, the use of TNF blockers, particularly in the case of chronic diseases/conditions that require long-term administration, such as arthritis and IBD, is limited. Approximately 30% of RA patients are non-responsive, or therapeutic benefits are not sustained, with the use of anti-TNF therapies (see, e.g., McCann et al. (2014) Arthritis & Rheumatology 66(10):2728-2738). Non-responsiveness also occurs in non-RA patients receiving anti-TNF therapeutics. Depending on the anti-TNF agent, 13-33% of treated patients do not respond to treatment, and up to 46% stop responding, resulting in discontinuation or dose increase (see, e.g., Richter et al. (2019) MABS 11(4):653-665). Thus, there is a need for therapies with improved therapeutic efficacy and safety.

[0656] Anti-TNF therapeutics block/sequester TNF and inhibit soluble TNF (solTNF) and transmembrane TNF (tmTNF) signaling via TNFR1 and TNFR2, respectively; solTNF signaling has been associated with chronic inflammation, while tmTNF signaling has been associated with the resolution of inflammation and with the induction of immunity against pathogens such as Listeria monocytogenes and Mycobacterium tuberculosis. The primary anti-inflammatory effects of anti-TNF therapies are achieved by blocking TNFR1, while blocking TNFR2 inhibits Treg cell activity. As discussed elsewhere herein, TNFR1 signaling is primarily inflammatory and is involved in the pathogenesis of inflammatory and autoimmune diseases and conditions, such as RA, psoriasis, IBD, and neurodegenerative disorders, such as MS; whereas, TNFR2 signaling has anti-inflammatory and protective effects in various cell and organ types, including neural, cardiac, gut and bone tissues, and also is involved in host defense mechanisms against infection by pathogens. Thus, as described herein, selective blockade of TNFR1 improves the therapeutic efficacy in comparison to anti-TNF therapies, by eliminating undesirable, proinflammatory signaling associated with RA and other autoimmune and inflammatory diseases and conditions, while preserving the beneficial effects of TNFR2 signaling (see, e.g., McCann et al. (2014) Arthritis & Rheumatology 66(10):2728-2738; Schmidt et al. (2013) Arthritis & Rheumatism 65(9):2262-2273; Blüml et al. (2012) International Immunology 24(5):275-281; Zalevsky et al. (2007) J. Immunol. 179:1872-1883).

[0657] Anti-TNF therapies have failed in the treatment of neurodegenerative diseases, such as Alzheimer's disease, Parkinson's disease, stroke and multiple sclerosis (MS), which have been associated with the overexpression of TNF. For example, in a phase II trial for the treatment of relapsing remitting MS, a TNFR1 receptor-Fc IgG1 fusion protein anti-TNF therapeutic, lenercept (Ro 45-2081), failed, and symptoms were increased/worsened compared to patients receiving a placebo, with neurologic deficits being more severe in lenercept-treated patients. These results indicate that anti-TNF therapies can aggravate demyelinating diseases. While TNFR1 has been shown to mediate inflammatory neurodegeneration, TNFR2 induces neuroprotection, thus, blockade of signaling through both receptors by anti-TNF therapies abrogates the neuroprotective effects of TNFR2 signaling. The blockade of TNFR1 with ATROSAB, a humanized monoclonal antibody that blocks TNFR1, or the activation of TNFR2 with EHD2-scTNF_{R2}, an agonistic TNFR2-selective TNF mutein, results in the protection of cholinergic neurons against cell death, and reverts the neurodegeneration-associated memory impairment in a mouse model of NMDA-induced acute neurodegeneration. This is likely to be immunogenic. ATROSAB is a partial TNFR1 agonist; those of skill in the art would not administer a TNFR1 agonist. The blockade of TNFR1 and TNFR2, however, abrogates the therapeutic effect, indicating that TNFR2 plays an essential role in neuroprotection, and that selective blockade of TNFR1 can be used for the treatment of neurodegenerative diseases where anti-TNF therapies have failed (see, e.g., Dong et al. (2016) Proc. Natl. Acad. Sci. USA 113(43):12304-12309).

[0658] Due to the adverse effects associated with the use of anti-TNF agents, the non-responsiveness of some patients, the lack of a sustained response in patients that had an initial response, and the failure to treat and/or exacerbation of neurodegenerative diseases, such as MS, other therapies are needed. Such therapies are provided herein.

### E. Therapeutics for Targeting TNFR1/TNFR2

[0659] The following section discusses exemplary therapeutics that target TNFR1/TNFR2, and describes some problems and limitations with these therapeutics. Existing therapeutics can be modified as described in Section F and the Examples, or are used, in whole or in part, or are modified to improve their properties for use, in the constructs that are provided herein.

### 1. TNFR1-Selective Antagonists

[0660] As discussed and provided herein, therapy with TNF blockers, such as etanercept, infliximab, adalimumab, and others abrogates TNF signaling via TNFR1 and TNFR2. While TNFR1 signaling results in inflammation, cytotoxicity and apoptosis, TNFR2 signaling is protective and anti-inflammatory, partly due to its expansion and activation of immunosuppressive Tregs, which destroy effector T cells in the autoimmune environment, preventing tissue destruction and disease progression. Therapy with TNF blockers, through its inhibition of TNFR2 signaling, and the consequential depletion of immunosuppressive Tregs, which results in a pro-inflammatory microenvironment, can fail in the treatment of, and/or can exacerbate, autoimmune and inflammatory diseases and disorders. The dual blockade of TNFR1 and TNFR2 also can lead to opportunistic infections and cancer.

[0661] As provided herein, the specific inhibition of TNFR1 signaling maintains normal TNFR2 function, which is necessary for maintaining the equilibrium between pro-inflammatory and anti-inflammatory activity, via the production of subsets of both regulatory and cytotoxic T cells. Selective TNFR1 inhibition retains the potent anti-inflammatory activity of TNFR2 signaling, results in fewer opportunistic infections and cancer, and preserves TNF-induced Treg functions.

a. TNFR1 antagonistic Antibodies

[0662] Among TNFR1 antagonist antibodies, is ATROSAB (Antagonistic TNF Receptor One-Specific Antibody). ATROSAB, the first TNFR1 blocking antibody, is a full-length IgG1 that is a humanized version of the neutralizing mouse anti-human TNFR1 monoclonal antibody H398. It was abandoned as a therapeutic because it has partial agonist activity, which activates TNFR1, thereby mimicking TNF activity, a toxic pathway. ATROSAB maintains the conformation of TNFR1 in an inactive state and obstructs the binding of TNF. The Fc region in ATROSAB is mutated to eliminate FCγR receptor binding and complement fixation, thereby avoiding unwanted immune system activation (see, e.g., Kalliolias and Ivashkiv (2016) Nat. Rev. Rheumatol. 12(1):49-62).

[0663] Full-length antibodies have the advantage of increased in vivo half-life, but, as discussed elsewhere herein, are not feasible for the development of TNFR1 antagonists due to receptor cross-linking, which tends to agonize TNFR1 instead of antagonizing it. This did not result from Fc cross-linking because the Fc-interacting part of the antibody was removed by mutation. For example, the IgG ATROSAB exhibited some TNFR1 agonistic activity in the absence of TNF, which was observed to a limited extent at a narrow concentration range, due to its bivalent molecular structure. The cross-linking of TNFR1 also can occur due to secondary events, such as interactions with FcγRs or anti-drug antibodies (ADAs), which must be avoided to maintain the antagonistic nature of TNFR1 inhibitors. ADAs have been observed in patients treated with infliximab or adalimumab at rates of 50% and 31%, respectively (see, e.g., Richter et al. (2019) mAbs 11(4):653-665; Richter et al., (2019) mAbs 11(1):166-177).

[0664] For purposes herein, the TNFR1 antagonists, including in all embodiments described above and below are those that are selected to not have agonist activity and/or are designed or modified to eliminate any agonist activity. As described herein, such TNFR1 agonists include those that bind to the same epitope as the dAb of EN1206 (SEQ ID NO:59).

b. Monovalent TNFR1 antagonistic Antibodies/Antibody Fragments

[0665] Small antibody fragments, such as domain antibodies and derivatives and modified forms thereof have been developed, and exemplary antibody fragments and modified forms are discussed in the following sections. The small antibody fragments, however, have not been successfully developed into pharmaceuticals. They are limited in their use as therapeutics; they have short serum half-lives and fast peripheral clearance, which are a result of their small size. For example, molecules that are 50-60 kDa in size or smaller are subject to renal filtration; dAbs and other antibody fragments, which are less than 50-60 kDa in size, are rapidly cleared by the kidneys. For example, the dAb, designated DMS5541, and similar molecules demonstrate selectivity for TNFR1, and potentially can inhibit the deleterious effects of TNFR1 signaling. DMS5541, which is formed from two dAbs (antiTNFR1 and anti-human serum albumin), is only approximately 25 kDa in size, and is too small to have desirable pharmacokinetics for therapeutic purposes. Its association with HSA, which is meant to stabilize its half-life, is only 34 nM, which means it is often in a dissociated state with respect to HSA. Single-domain antibodies (sdAbs) that have been tested so far are expressed in E. coli, and are prone to aggregation (unfolding) during manufacturing. Additionally, sdAbs prepared cytoplasmically (from direct expression in E. coli) often lack the conserved disulfide bond found in variable heavy domains, which both decreases their melting point and can decrease their ability to refold. The rapid clearance and short elimination half-life of small antibody fragments, which can be less than a few hours, decreases the in vivo efficacy and necessitates frequent administration and/or continuous infusion, which can reduce patient compliance. Because these molecules (see, e.g., Holland et al. (2013) J Clin Immunol 33(7):1192-203) were produced in E. coli, and were often not correctly folded, leading to poor solubility and immunogenicity, resulting in their clinical failure (see, e.g., adisinsight.springer.com/drugs/800037882).

[0666] The constructs, such as the TNFR1 antagonist constructs, provided herein address this problem as well as other problems, such as the immunogenicity, and reactions with pre-existing antibodies. Provided herein are constructs containing small antibody fragments, such as dAbs, with specificity towards TNFR1 and/or TNFR2, that exhibit improved pharmacological, such as pharmacokinetic, properties, including longer serum half-life, increased stability, reduced/slower peripheral clearance, and lower immunogenicity compared to the dAbs of the prior art.

[0667] Therapeutic antibodies of a variety of structures can be potent and well-tolerated therapeutics. Antibodies are used for the treatment of a variety of diseases and conditions, including, for example, rheumatoid arthritis (e.g., adalimumab, sold under the trademark Humira®); cancers, such as non-Hodgkin's lymphoma (e.g., rituximab and ibritumomab tiuxetan, sold under the trademarks Rituxan® and Zevalin®, respectively) and breast and gastric cancers (e.g., trastuzumab, sold under the trademark Herceptin®); and respiratory syncytial virus infection (e.g., palivizumab, sold under the trademark Synagis®). Manufacturing of complete antibodies has several limitations, such as the reliance on mammalian cell expression. As a result, antigen-binding fragments of antibodies, such as Fabs (~57 kDa) and single chain Fv fragments (scFvs, ~27 kDa), and other structures, which can be selected in vitro, such as with phage display (circumventing animal immunization), and which can be manufactured in large quantities using bacterial or yeast cell cultures, have been developed. A Fab fragment contains a V_{H}-C_{H}1 polypeptide, linked to a V_{L}-C_{L} polypeptide via a disulfide bond; an scFv is a fusion protein containing a V_{H} domain and V_{L} domain linked by a short polypeptide linker. Another class of therapeutic, small fragments of antibodies are domain antibodies (dAbs; also known as single domain antibodies, or sdAbs), which are monomeric and contain a variable domain of the heavy chain (V_{H}) or of the light chain (V_{L}) of an antibody. dAbs are the smallest antigen-binding fragments of antibodies; they are approximately 11-15 kDa in size, which is about one-tenth the size of a full monoclonal antibody (mAb) (see, e.g., Holt et al. (2003) Trends in Biotechnology 21(11):484-490). Similar to dAbs, nanobodies (Nbs) are small antigen-binding fragments derived from camelid heavy-chain antibodies that are devoid of light chains. Nanobodies are small (~15 kDa), have low immunogenicity and high affinity, are soluble and stable, and are encoded by a single gene/exon (VHH), so that they are modular, which allows for high yield production in bacteria and yeasts (see, e.g., Steeland et al. (2015) J. Biol. Chem. 290(7):4022-4037; Steeland et al. (2017) Sci. Reports 7:13646).

i. Fab- and scFv-Based TNFR1 Antagonists

[0668] As discussed above, the humanized semi-agonistic/antagonistic TNFR1-specific antibody, ATROSAB, inhibits TNFR1-mediated cellular responses. ATROSAB exhibits some TNFR1 agonistic activity, likely due to its bivalent molecular structure or by virtue of its binding to TNFR1, in the absence of TNF. The parental mouse antibody, H398, possesses stronger inhibitory potential, which is due to the faster dissociation of ATROSAB (i.e., a higher k_{off} value) compared to H398. This was determined using quartz crystal microbalance (QCM) measurements, in which antigen density on the chip was reduced to favor monovalent interactions; a slower dissociation of monovalently bound H398 from TNFR1, and the resulting longer receptor occupation, contributes to the improved blockade of TNFR1. Thus, to eliminate the TNFR1 agonistic activity of ATROSAB, and to improve its TNFR1 antagonistic activity, monovalent derivatives of ATROSAB were developed.

[0669] To increase the affinity and antagonistic activity of ATROSAB, the single-chain variable fragment (scFv) of ATROSAB was subjected to a first affinity maturation by site-directed mutagenesis of exposed residues within individual CDRs, or combinations of CDRs, and selection by phage display against human TNFR1-Fc. The scFv of ATROSAB contains the V_{H} domain, corresponding to residues 1-115 of the ATROSAB heavy chain (see, SEQ ID NO:31), linked by a short peptide linker to the V_{L} domain, corresponding to residues 1-113 of the ATROSAB light chain (see, SEQ ID NO:32). A clone, scFv IG11 (see, SEQ ID NO:674), with 6 mutations within CDR-H2 of the ATROSAB heavy chain, Y52V, Y54T, S55Q, H57E, Y59K, and E62D, with reference to SEQ ID NO:31, exhibited slower receptor dissociation and improved equilibrium binding to human TNFR1-Fc, and improved inhibition of TNF-induced TNFR1 activation. This clone was further subjected to random mutagenesis, generating the clone scFv T12B (see, SEQ ID NO:675), containing the mutations Q1H, Y52V, Y54S, S55Q, H57E, Y59K, and E62D in the V_{H} domain (with reference to SEQ ID NO:31), and S96G in the V_{L} domain (with reference to SEQ ID NO:32). scFv T12B had reduced dissociation from immobilized TNFR1-Fc compared to the scFv of ATROSAB and to scFv IG11, and increased TNFR1 inhibitory activity (see, e.g., Richter et al. (2019) mAbs 11(1):166-177; see, also, Richter, F. Thesis, entitled “Evolution of the Antagonistic Tumor Necrosis Factor Receptor One-Specific Antibody ATROSAB,” Universitat Stuttgart, 2015; available from pdfs.semanticscholar.org/d8e7/8b87d76dce36225cid497939ef37445cfa8a.pdf).

[0670] The humanization of H398 was re-engineered by an exchange of VH and VL framework regions of H398 with alternative germline genes to optimize CDR arrangement. scFv 13.7, containing the VH domain of scFV T12B, linked by a short peptide linker to a newly humanized VL domain of H398, had similar binding to human TNFR1-Fc in ELISA and QCM, improved inhibition of TNF-induced TNFR1 activity, and improved thermal stability, with a 10 degree Celsius higher melting temperature compared to scFv T12B. Based on scFv 13.7, an IgG and a Fab, with constant regions identical to ATROSAB, were generated (IgG 13.7 and Fab 13.7, respectively), which had increased binding to TNFR1 compared to ATROSAB (1.4-fold) and the Fab of ATROSAB (Fab ATR; 8.7-fold), respectively. Fab 13.7 also had reduced dissociation from immobilized TNFR1-Fc, compared to Fab ATR, with an 18.8-fold improved monovalent affinity. Thus, affinity maturation and framework replacement resulted in improved binding to TNFR1 for Fab 13.7. Fab 13.7 and IgG 13.7 displayed selectivity towards TNFR1-Fc and did not bind to a TNFR2-Fc fusion protein; Fab 13.7 bound to human and rhesus TNFR1-Fc, but not to mouse and rat TNFR1-Fc, showing a similar binding pattern to ATROSAB. In vitro, monovalent Fab ATR and Fab 13.7 did not activate TNFR1, while ATROSAB displayed marginal activation of TNFR1 activity and IgG 13.7 strongly activated TNFR1. The agonistic activity of IgG 13.7 can be due to the improved affinity and slower dissociation from TNFR1, resulting in the formation of stable signaling competent receptor-antibody complexes. Fab 13.7 displayed improved inhibition of TNFR1 activity compared to Fab ATR and to ATROSAB, and lacked any agonistic activity. Incubation of Fab 13.7 or ATROSAB with cross-linking anti-human Fab serum, revealed that Fab 13.7 does not activate TNFR-1, while ATROSAB does (see, e.g., Richter et al. (2019) mAbs 11(1):166-177).

[0671] Compared to ATROSAB, which has an initial half-life of 0.44 hours, a terminal half-life of 32.1 hours, and an area under the curve (AUC) of 181 μg/ml×h, Fab 13.7 (with a molecular mass of ~47 kDa). Fab 13.7 displayed an initial half-life of 0.08 h, a terminal half-life of 1.4 h, and an AUC of 4.2 pg/ml x h, which were similar to the values obtained for Fab ATR. To extend the half-life, a Fab′ fragment, Fab′ 13.7, was generated by introducing a free cysteine residue at the C-terminus of the CH1 domain, which was chemically coupled to a branched PEG_{40kDa} moiety, generating Fab 13.7PEG. Fab 13.7 also was fused through its Fd and a short flexible linker to the N-terminus of mouse serum albumin (MSA), generating Fab 13.7-MSA. A monovalent Fab-Fc fusion protein was generated by fusing Fab 13.7 to a modified Fc, lacking the cysteine residues in the hinge region and the ability to dimerize via the CH3 domain, generating a one-armed half-IgG molecule (IgG1_{half}13.7). A monovalent Fv-Fc molecule also was generated by fusing the VH and VL domains to a hetero-dimerizing knob-into-hole (kih) Fc chain lacking the cysteine residues in the hinge region (Fv13.7-Fcₖᵢₕ). None of the derivatives showed any agonistic TNFR1 activity, and, compared to Fab 13.7, a slightly reduced binding to human TNFR1-Fc was observed for Fab13.7PEG, Fab13.7-MSA and IgG1_{half}13.7; binding of Fv13.7-Fcₖᵢₕ was not affected. Inhibition of TNF-mediated TNFR1 activity was reduced by 1.5-3.3 fold compared to Fab 13.7; Fab13.7PEG showed the strongest impairment in function, and Fv13.7-Fcₖᵢₕ showed the lowest change in bioactivity. IgG_{half}13.7 showed a similar half-life to Fab 13.7, and an AUC value that was increased by 7.1-fold. Fab13.7PEG, Fab13.7-MSA and Fv13.7-Fcₖᵢₕ had extended terminal half-lives, with values of 14.4 h, 9.7 h, and 10.5 h, respectively, and increased AUC values. Thus, the fusion protein Fv13.7-Fcₖᵢₕ, which was engineered for heterodimeric assembly of two peptide chains by using knobs-into-holes technology, displayed the best combination of improved pharmacokinetic properties and TNFR1 antagonistic activity (see, e.g., Richter et al. (2019) mAbs 11(1):166-177; see, also, Richter, F. Thesis, entitled “Evolution of the Antagonistic Tumor Necrosis Factor Receptor One-Specific Antibody ATROSAB,” Universitat Stuttgart, 2015; available from pdfs.semanticscholar.org/d8e7/8b87d76dce36225c1d497939ef37445cfa8a.pdf).

[0672] In another study, to improve the pharmacokinetic properties, such as serum half-life, of Fab 13.7, an IgG-like Fc was incorporated into the molecule, while retaining the Fab-like heterodimerization of the polypeptide chains. To achieve this, the variable domains of the heavy and light chains of Fab 13.7 were fused to the N-termini of newly generated heterodimerizing Fc chains, known as Fc-one/kappa (Fc1κ). The Fc heterodimerization approach is based on interspersed Ig domains, derived from the heterodimerizing IgG1 constant heavy chain domain, CH1, and the kappa light chain constant domain, CLκ, and containing sections of the IgG1 CH3 sequence to mediate FcRn binding and enable FcRn-mediated drug recycling in vivo. The interspersed Ig domains include “CH31,” which contains amino acid sequence fragments of CH1 and CH3, and “CH3kappa” (CH3κ), which contains amino acid sequence fragments of CLκ and CH3. IgG1 CH2 domains also were fused to the N-termini of the CH31 and CH3κ domains, to include the entire FcRn binding region of the IgG molecule. Addition of the IgG1 hinge region to the N-termini of the CH2 domains results in a covalently linked heterodimerizing Fc moiety, known as Fc1κ. In contrast to other Fc heterodimerization technologies, such as knobs-into-holes, which involve replacement of one or more amino acids at the CH3-CH3 interface, Fc heterodimerization was achieved by exchanging larger amino acid sequence stretches obtained from human antibody sequences. Asymmetric scFv-Fc1κ fusion proteins were prepared and compared to scFv fusions with Fcs containing knobs-into-holes, and heterodimer formation was similar or improved, compared to the fusions containing knobs-into-holes technology (see, e.g., Richter et al. (2019) mAbs 11(4):653-665).

[0673] The variable domains of the TNFR1-specific Fab 13.7 molecule were fused to the CH2 domain N-termini of the CH31- or CH3κ-containing Fc chains with a short peptide linker, by fusing the VH to the CH2-CH3κ chain and the VL to the CH2-CH31 chain (VL13.7-CH2-CH31/VH13.7-CH2-CH3κ; VL1C/VHκC), generating the monovalent TNFR1-specific antagonistic antibody-derived molecule (Fv-Fc1κ fusion protein), known as Atrosimab (72 kDa in size). Atrosimab lacks the ability to mediate Fc effector functions, due to mutations that were introduced into Fc1κ; the lack of binding to effector molecules of the immune system prevents the activation of TNFR1 due to secondary crosslinking of Atrosimab bound to cells expressing FcγRs. Atrosimab bound to TNFR1 with high affinity (K_{D} 2.7 nM), inhibited TNF-induced activation of TNFR1 with IC₅₀ values of 16-55 nM in various in vitro assays, and in the presence of anti-human IgG antibodies (i.e., cross-linking antibodies), and displayed improved pharmacokinetic properties. Compared to the parental Fab 13.7 molecule, TNFR1 binding and inhibition was slightly reduced, which can be attributed to alterations in the VH and VL pairing after fusion to the CH2 domain. The initial and terminal half-lives of Atrosimab were determined to be 2.2+/−1.2 h and 41.7+/−18.1 h, respectively, and the AUC was 5856+/−1369.9 pg/ml x h. The terminal half-life of Atrosimab was extended almost 40-fold compared to that of Fab 13.7, and was extended by 1.3-fold compared to ATROSAB; these values may be inaccurate, however, because the injected doses of Fab 13.7 and ATROSAB were lower, which can affect pharmacokinetic properties (see, e.g., Richter et al. (2019) mAbs 11(4):653-665).

ii. Domain Antibody (dAb)-Based TNFR1 antagonists

[0674] Another class of therapeutics, small fragments of antibodies, are domain antibodies (dAbs; also known as single domain antibodies, or sdAbs), which are monomeric and contain a variable domain of the heavy chain (V_{H}) or of the light chain (V_{L}) of an antibody. dAbs are the smallest antigen-binding fragments of antibodies; they are approximately 11-15 kDa in size, which is about one-tenth the size of a full monoclonal antibody (mAb). Similar to dAbs, are the nanobodies that occur in camelids, which produce antibodies that contain only heavy chains, where the antigen-binding site is a single unpaired variable domain, known as a V_{HH}. In a dAb, there are three complementarity determining regions (CDRs) on each V_{H} and each V_{L}; thus, each dAb contains three out of the six CDRs from a V_{H}-V_{L} pair in an antibody, which are the highly diversified loop regions that bind to the target antigen.

[0675] Due to their smaller size, dAbs are produced at higher yields from bacterial cultures, and are more amenable to phage display, since only a single polypeptide chain is produced. Specific dAbs with high affinities and potencies rapidly can be produced by protein engineering. The small size of dAbs also allows for increased tissue penetration, stability, and choice of delivery formulations. Due to their small size, it is possible to create molecules containing linked dAbs that are specific for different antigens/targets, which is not possible with conventional antibodies, and is difficult to achieve for other antibody fragments, such as Fabs and scFvs. Due to the monomeric and monovalent binding modality of dAbs, they are suitable for use where the targets are not amenable to intervention with monoclonal antibodies. TNFR1 is one such target; TNFR1 is activated/agonized by antibody-induced receptor cross-linking (see, e.g., Holt et al. (2003) Trends in Biotechnology 21(11):484-490; Schmidt et al. (2013) Arthritis & Rheumatism 65(9):2262-2273; Goodall et al. (2015) PLoS ONE 10(9):e0137065).

[0676] Small size antibody fragments, such as dAbs, scFvs, Fvs, disulfide-bonded Fvs and Fabs, are easier to produce and handle, and are distributed rapidly throughout the body, in comparison to larger molecules; however, their short in vivo half-life limits their therapeutic efficacy. As with other antibody fragments, increasing the serum half-life of dAbs increases the therapeutic efficacy and decreases the frequency of dosing, particularly in applications that require binding antigens in the bloodstream, such as in the treatment of rheumatoid arthritis or cancer. This can be achieved by PEGylation, conjugation to serum albumin, fusion with a second dAb with specific binding to serum albumin, or fusion to an Fc fragment or complete antibody constant regions. Fusion with an Fc region also allows for the recruitment of Fc effector functions, including complement activation, antibody-dependent cellular cytotoxicity, or Fc-mediated clearance of immune complexes (see, e.g., Holt et al. (2003) Trends in Biotechnology 21(11):484-490; Goodall et al. (2015) PLoS ONE 10(9):e0137065).

a) Anti-TNFR1 dAb-Anti-Albumin dAb Fusion Constructs

[0677] DMS5540 is a 25 kDa mouse TNFR1 antagonist, that is a bispecific single variable domain antibody, containing a noncompetitive (does not interfere with TNF binding) anti-TNFR1 dAb, fused with an albumin-binding dAb (AlbudAb; to extend serum half-life). DMS5540, which does not bind human TNFR1, was found to inhibit TNF-α-mediated cytotoxicity in the mouse fibroblast cell line L929 (which is highly sensitive to TNF-α-mediated cytotoxicity). DMS5540 was administered to mice intravenously, followed four hours later with an intravenous bolus injection of TNF-α, and serum IL-6 levels were assessed. DMS5540 demonstrated a dose-dependent inhibition of TNF-α-mediated signaling effects in vivo, as determined by a decreased IL-6 response, when compared to mice administered a control dAb lacking specific antigen binding but fused to AlbudAb (DMS5538), or no dAb (see, e.g., Goodall et al. (2015) PLoS ONE 10(9):e0137065).

[0678] In another study, mice with collagen-induced arthritis (CIA) were treated, beginning on the day of arthritis onset, for 10 days with DMS5540, an isotype (negative) control dAb (DMS5538), or murine TNFR2 genetically fused with mouse IgG1 Fc domain (mTNFRII-Fc; mTNFR2.Fc), which blocks both receptors (TNFR1 and TNFR2) and inhibits mouse TNF, and disease progression was monitored. The concentrations of systemic cytokines were measured, the numbers of T cell subsets in lymph nodes and spleens were assessed, and intrinsic Treg cell function was evaluated. Disease progression was suppressed similarly by blockade of TNFR1 with DMS5540 and blockade of TNFR1/2 with mTNFRII-Fc, compared to the negative control, indicating that blockade of TNFR1 or TNF protects joints from inflammatory mediators that result in joint damage in arthritis. Effector T cell activity, measured in terms of the expression levels of proinflammatory cytokines (e.g., IFNγ, IL-10 and RANTES), was increased following blockade of TNFR1/2 with mTNFRII-Fc, but not following the selective blockade of TNFR1 with DMS5540, indicating an immunoregulatory role (e.g., T cell effector function suppression) for TNFR2 signaling. Additionally, blockade of TNFR1, but not of TNFR1/2, resulted in the expansion and activation of Treg cells, while an increase in the expression of FoxP3 and TNFR2, both of which are expressed by Tregs, was observed in joints undergoing remission, indicating their role in the resolution of inflammation. These results indicate that inhibiting TNFR1, but not TNFR2, signaling inhibits inflammation and promotes Treg cell suppressor activity, resulting in enhanced therapeutic efficacy compared to traditional methods of TNF inhibition (see, e.g., McCann et al. (2014) Arthritis & Rheumatology 66(10):2728-2738).

[0679] DMS5540 also more effectively prevents inflammation-induced osteoclast formation and bone loss, than mTNFR2.Fc (anti-TNF), in an in vivo mouse model of lipopolysaccharide (LPS)-induced osteolysis. TNFR2-deficient mice displayed an increase in LPS-induced bone destruction. In vitro, the human equivalent of DMS5540, DMS5541, which contains an anti-human TNFR1 dAb, reduced human osteoclastogenesis in the presence and absence of low-dose TNF more effectively than etanercept. These results indicate an osteo-protective role for TNFR2 signaling. As a result, selective inhibition of TNFR1 also can be used for therapeutic intervention in inflammatory bone loss disorders, such as osteomyelitis and periprosthetic osteolysis and aseptic loosening (see, e.g., Esperito Santo et al. Biochem. Biophys. Res. Commun. 464:1145-1150).

[0680] DMS5541 (also known as TNFRI-AlbudAb), which contains a noncompetitive human TNFR1-specific dAb fused to AlbudAb, was evaluated for the selective blockade of TNF signaling via TNFR1, in ex vivo cultured human rheumatoid arthritis (RA) synovial membrane mononuclear cells (MNCs), which express TNFR1 and TNFR2, and produce inflammatory cytokines and chemokines spontaneously, in the absence of exogenous stimulation. DMS5541 inhibited the production of the proinflammatory cytokines GM-CSF, IL-10, IL-10 and IL-6, and the chemokines IL-8, RANTES (CCL5) and MCP-1 (CCL2), at similar levels to TNF ligand blockade with etanercept. This inhibition was not due to cellular toxicity, as DMS5541 inhibited TNF-α-induced cytotoxicity in human rhabdomyosarcoma KYM-1D4 cells in a dose-dependent manner, similar to TNF blockade with etanercept. In addition, DMS5541 inhibited the production of soluble TNFR1, but not soluble TNFR2, demonstrating selectivity for TNFR1. These results indicate that the TNFR1 pathway is the dominant inflammatory pathway that is responsible for the TNF response observed in the ex vivo cultured RA synovial membrane MNC disease model (see, e.g., Schmidt et al. (2013) Arthritis & Rheumatism 65(9):2262-2273).

### b) Domain Antibody Fragments Designated GSK1995057 and GSK2862277

[0681] The domain antibody fragment designated GSK1995057 (see, SEQ ID NO:55) is a short-acting, fully human domain antibody (dAb) fragment (containing a V_{H} chain) that selectively antagonizes TNF signaling through TNFR1, but not TNFR2. Due to its small size, GSK1995057 can be nebulized directly to the lungs, and has been investigated in the treatment of animal and human models of acute respiratory distress syndrome (ARDS) via inhalation. GSK1995057 reduces pulmonary inflammation in non-human primate (cynomolgus monkey) and human models of ARDS. Pulmonary neutrophil infiltration is central to the pathogenesis of ARDS, and is increased by damage to the alveolar-capillary barrier caused by the action of proinflammatory mediators. TNF-α contributes to increased endothelial permeability, and GSK1995057 prevents this increase, indicating that TNFR1 signaling mediates TNF-induced endothelial permeability (see, e.g., Proudfoot et al. (2018) Thorax 73:723-730). Because of its inherent short half-life and neutralization by auto-antibody, the trial failed. The immunogenicity of GSK1995057 may be due more to improper folding of the protein made in E. coli than as a failure to properly humanize the dAb; it was derived from a human antibody fragment, and only the hypervariable sequences were altered to adapt specificity for TNFR1 (see, e.g., International PCT Publication No. WO2008/149148A2).

[0682] In monkeys exposed to a single inhaled lipopolysaccharide (LPS) challenge, which is a well-established model that triggers a clinically relevant inflammatory response modeling subclinical tissue injury, pretreatment with GSK1995057 reduces pulmonary neutrophil infiltration, levels of proinflammatory chemokines, markers of endothelial injury and alveolar-capillary leak, in a dose-dependent manner. The results indicate that inhaled GSK1995057 can effect the same results as higher doses of parenterally administered antibodies. In a clinical trial, in which healthy human subjects were pretreated with a single nebulized dose of GSK1995057 and then exposed to a low dose of inhaled LPS, the pretreated subjects experienced less systemic inflammation, as well as less neutrophilic lung inflammation and signs of endothelial injury in response to LPS challenge, in comparison to subjects who received a placebo. Despite these results, translation into the clinic is not likely. In the trial GSK1995057 was administered prior to the LPS challenge, but patients with ARDS, generally require treatment after the initial injury (see, e.g., Proudfoot et al. (2018) Thorax 73:723-730), not before.

[0683] Another difficulty is the detrimental effects of anti-drug antibodies (ADAs) on anti-TNFR1 agents, which were observed in a clinical Phase I study of GSK1995057, in which cytokine release infusion reactions, at doses of 2-10 pg/kg, were observed due to high levels of pre-existing, naturally occurring anti-immunoglobulin autoantibodies, (i.e., ADAs) present in approximately 50% of drug naive, healthy subjects. Specifically, the ADAs were human anti-V_{H} (HAVH) autoantibodies, and the complex of HAVH autoantibodies with framework sequences of GSK1995057 resulted in the activation of TNFR1 signaling, and the occurrence of mild to moderate infusion reactions in subjects with high HAVH autoantibody titers (see, e.g., Cordy et al. (2015) Clin. Exp. Immunol. 182:139-148).

[0684] The binding of HAVH autoantibodies to a framework region of the dAb GSK1995057 induces cytokine release in vitro. The epitope on GSK1995057 for the autoantibodies was characterized. Pre-existing anti-drug antibodies (ADAs) bind to an epitope close to the C-terminal regional of V_{H} dAbs, including the dAb GSK1995057. To counter this, a modified dAb, designated GSK2862277 (see, SEQ ID NO:56) was generated by adding a single alanine residue at the C-terminus of the modified dAb. This modification reduced binding to HAVH autoantibodies. In serum samples from healthy subjects that screened positive for HAVH autoantibodies that bind to GSK1995057, the frequency of pre-existing autoantibodies decreased from 51% for GSK1995057-specific HAVH autoantibodies, to 7% for GSK2862277-specific autoantibodies. Human in vitro systems and animal in vivo experiments showed that GSK2862277 does not induce TNFR1 activation, even in the presence of GSK2862277-specific autoantibodies, and that the pharmacology and biophysical properties of GSK2862277, including target affinity, in vitro potency and in vivo pharmacokinetics and pharmacodynamics, is comparable to those of the parent dAb (GSK1995057).

[0685] A Phase I clinical trial to investigate the safety, tolerability, pharmacokinetics and pharmacodynamics of single and repeat doses of inhaled (i.h.) and intravenous (i.v.) GSK2862277 found that GSK2862277 was generally well tolerated when administered via inhalation or intravenously. One subject, however, had a mild infusion reaction with cytokine release after repeated IV dosing; this subject had high serum levels of pre-existing antibodies to GSK2862277, and the serum antibodies from this subject were shown to activate TNFR1 signaling in an in vitro assay. The interaction between GSK2862277 and the autoantibodies result in antibody-mediated, GSK2862277-dependent cross-linking of cellular TNFR1, agonizing the receptor and leading to cytokine release. Thus, despite the reduced binding of GSK2862277 to pre-existing HAVH autoantibodies, adverse effects were still associated with the presence of a new pre-existing antibody response, that was specific to the modified dAb framework. These results highlight challenges in developing biological antagonists against TNFR1 (see, e.g., Cordy et al. (2015) Clin. Exp. Immunol. 182:139-148). Thus, there remains a need for improved TNFR1 antagonists.

iii. Nanobodies (Nbs)

[0686] Similar to dAbs, nanobodies (Nbs) are small antigen-binding fragments derived from camelid heavy-chain antibodies that are devoid of light chains. They are small (15 kDa), have low immunogenicity and high affinity, are soluble and stable, and are encoded by a single gene/exon (VHH), making them modular and allowing for high yield production in bacteria or yeasts.

iv. Anti-TNFR1 Nanobody-Anti-Albumin Nanobody Fusion Constructs

[0687] TROS (TNF Receptor One-Silencer; also called Nb Alb-70-96) is a trivalent high-affinity nanobody-based selective inhibitor of human TNFR1 that competes with TNF for binding to TNFR1. To generate TROS, two anti-human TNFR1 nanobodies (Nb 70 and Nb 96; see, SEQ ID NOs: 683 and 684, respectively), which had been generated from a VHH library that was constructed by immunization of alpacas with recombinant human soluble TNFR1, were linked and, via (Gly₄Ser)₃ linkers, were linked to an anti-albumin nanobody (Nb Alb) to increase serum half-life to produce the trivalent TROS. The serum half-life of the resulting TROS is ~24 hours; the serum half-life of monovalent Nbs is only ~1.5 hours. Treatment with TROS delays disease onset in mouse experimental autoimmune encephalomyelitis (EAE; a model of MS), and prevents established disease; the therapeutic effects are due to the diversion of TNF to signal through TNFR2, and the effects of such signaling. TROS also inhibits inflammation in ex vivo cultured colon biopsies of Crohn's disease patients, and antagonizes inflammation in a model of acute TNF-induced liver inflammation in liver chimeric humanized mice (see, e.g., Steeland et al. (2015) J. Biol. Chem. 290(7):4022-4037; Steeland et al. (2017) Sci. Reports 7:13646).

c. Dominant-Negative Inhibitors of TNF (DN-TNFs)/TNF Muteins

[0688] Another class of TNF inhibitors are the signaling-incompetent dominant-negative inhibitors of TNF (DN-TNFs), also known as TNF muteins. The DN-TNFs are engineered variants of TNF with mutations that abrogate binding to and signaling through TNFR1 and TNFR2. DN-TNFs selectively inhibit soluble TNF (sTNF or solTNF) by rapidly exchanging subunits with native TNF homotrimers, forming inactive mixed TNF heterotrimers with disrupted receptor binding surfaces, thus preventing interaction with TNF receptors. DN-TNFs leave transmembrane TNF (tmTNF) unaffected, maintaining the protective roles of TNF signaling through TNFR2. DN-TNFs inhibit TNF-induced NF-cB activity and caspase-mediated apoptosis, and reduce disease severity in animal models of arthritis and Parkinson's disease. These molecules because of their structure likely are immunogenic.

[0689] As selective inhibitors of soluble TNF, DN-TNFs, unlike anti-TNF therapies that bind to solTNF and to tmTNF, do not inhibit tmTNF signaling, and do not suppress the resistance of mice to infection by L. monocytogenes. Examples of DN-TNFs are TNF mutants containing one or more of the replacements L133Y, S162Q, Y163H, I173T, Y191Q and A221R, with reference to the sequence of amino acids set forth in SEQ ID NO:1 (corresponding to residues L57Y, S86Q, Y87H, I97T, Y115Q, and A145R, with reference to the sequence of solTNF, as set forth in SEQ ID NO:2), which impair binding to TNFRs. Additional modifications, for example, to improve expression, allow site-specific PEGylation, also can be included (see, e.g., Zalevsky et al. (2007) J. Immunol. 179:1872-1883).

[0690] For example, the TNF mutations R32W and S86T, with reference to SEQ ID NO:2, result in a several hundred-fold loss in affinity towards TNFR2, but do not affect binding to TNFR1. The R32W/S86T double mutant abrogates all binding to TNFR2, with no loss in binding to TNFR1. The mutations L29S, L29G, L29Y, R31E, R31N, R32Y, R32W, S86T, L29S/R32W, L29S/S86T, R32W/S86T, L29S/R32W/S86T, R31N/R32T, R31E/S86T, R31N/R32T/S86T, and E146R, with reference to SEQ ID NO:2, also impart selectivity towards TNFR1. The mutations D143N, D143Y, A145R and D143N/A145R, with reference to SEQ ID NO:2, render the TNF variants selective for TNFR2 (see, e.g., Loetscher et al. (1993) J. Biol. Chem. 268(35):26350-26357; U.S. Pat. No. 5,422,104).

[0691] A modified TNF, designated XPro1595 (INmuneBio; see, SEQ ID NO:701), is a PEGylated, soluble DN-TNF mutein that preferentially inhibits TNFR1 signaling, and contains the mutations ViM, R31C, C69V, Y87H, C101A and A1456R, with reference to SEQ ID NO:2 (see, e.g., U.S. Publication No. 2015/0239951). XPro1595 decreases neuroinflammation and is being investigated in the treatment of Alzheimer's disease (see, e.g., clinical trial identifier No. NCT03943264). XPro1595 blocks the development of amyloid pathology in a mouse model of Alzheimer's Disease (3×TgAD), prevents the loss of neuron communication and cognitive impairment in a different (tgCRND8) mouse model of Alzheimer's Disease, attenuates the dysfunction in neuronal communication and cognitive deficit in normal aged rats, and prevents young mice from developing amyloid pathology, cognitive impairment, and dysfunction in neuronal communication, in a third model (5×FAD) of Alzheimer's disease. In older mice that have Alzheimer's-like pathology, XPro1595 reduced amyloid, improved cognition, rescued neuron communication, and also, normalized innate and adaptive immune responses.

[0692] The levels of TNFR1 are higher in the hippocampus, in comparison to TNFR2, in aged (22 months) but not young adult (6 months) Fischer 344 rats. When treated with XPro1595, aged rats exhibit improved Morris Water Maze performance, reduced microglial activation, reduced susceptibility to hippocampal long-term depression, increased levels of the GluR1 type glutamate receptors, and lower L-type voltage sensitive Ca²⁺ channel (L-VSCC) activity in hippocampal CA1 neurons, indicating that functional changes associated with brain aging can occur from selective alterations in TNF signaling. In animal models of Parkinson's disease and aging, XPro1595 suppresses neuroinflammation and the activation of microglia. In EAE (a model of MS), XPro1595 ameliorates disease, improves remyelination and reduces CNS lesions and neuroinflammation. XPro1595 also ameliorates inflammatory arthritis, and decreases susceptibility to infection in treated animals. In comparison to etanercept, which had no therapeutic effect, treatment with XPro1595 delayed the onset of EAE and ameliorated symptoms more efficiently. XPro1595 administration increases the level of TNFR2 expression in the lesion area in EAE, indicating that tmTNF signaling via TNFR2 is implicated in neural regeneration (see, e.g., Yang et al. (2018) Front. Immunol. 9:784; Sama et al. (2012) PLoS ONE 7(5):e38170). Since XPro1595 does not inhibit the activity of transmembrane TNF (which activates TNFR1 and TNFR2), it cannot block the inflammatory effects of TNFR1. This also applies to other dominant negative TNF reagents, described below.

[0693] XENP345 (see, SEQ ID NO:702) is a PEGylated DN-TNF mutein, containing the mutations I97T/A145R, with reference to SEQ ID NO:2. The in vivo neutralization of soluble TNF (solTNF) by XENP345 in animal models of Parkinson's disease and Alzheimer's disease is neuroprotective, reduces neuronal degeneration and cognitive dysfunction, and slows down neurodegenerative disease progression (see, e.g., McCoy et al. (2006) J. Neurosci. 26(37):9365-9375; McAlpine et al. (2009) Neurobiol. Dis. 34(1):163-177).

[0694] R1antTNF (see, SEQ ID NO: 703) is a TNFR1-selective antagonistic mutant TNF, identified from a phage library displaying structural human TNF variants in which each of the six amino acid residues at the receptor-binding site, corresponding to residues 84-89 of SEQ ID NO:2, were mutated. R1antTNF, which contains the mutations A84S, V85T, S86T, Y87H, Q88N and T89Q, has similar affinity to TNFR1 as wild-type human TNF, and does not interfere with TNFR2 activity. R1antTNF ameliorated liver injury, as evidenced by reductions in the serum levels of alanine aminotransferase and the pro-inflammatory cytokines IL-2 and IL-6, in two models of acute hepatitis. The plasma half-life of R1antTNF, like wild-type TNF, however, is very short (12 min). To increase the in vivo half-life of R1antTNF, a PEGylated version, PEG-R1antTNF, in which PEG is bound to the N-terminal site of R1antTNF, was produced. PEG-R1antTNF decreases morbidity, ameliorates disease symptoms, improves demyelination in an EAE mouse model, and suppresses Th1 and Th17 cell activation and inflammatory T-cell infiltration in the spinal cord. PEG-R1antTNF also inhibits NF-κB, suppresses smooth muscle cell proliferation, and decreases chemokine and adhesion molecule expression, thus decreasing intimal hyperplasia and arterial inflammation in IL-1 receptor antagonist-deficient mice after inducing femoral artery injury in an external vascular cuff model. When the effects on antiviral immunity of PEG-R1antTNF and etanercept were compared using a recombinant adenovirus vector, PEG-R1antTMF did not reactivate viral infection and did not affect the clearance of injected adenovirus, while viral load increased after treatment with etanercept. PEG-R1antTNF treatment also delayed and ameliorated CIA symptoms in prophylactic and therapeutic settings, and was more effective than etanercept when used for the treatment of established CIA (see, e.g., Yang et al. (2018) Front. Immunol. 9:784; Shibata et al. (2008) J. Biol. Chem. 283(2):998-1007; Kitagaki et al. (2012) J Atheroscler. Thromb. 19(1):36-46; Fischer et al. (2015) Antibodies 4:48-70; Horiuchi et al. (2010) Rheumatology (Oxford) 49:1215-1228).

[0695] Soluble TNFR1 also has been associated with an increased risk of developing MS; thus, neutralization of soluble TNFR1, which cannot be achieved with DN-TNFs/TNF muteins, can be beneficial. In contrast to inhibitors of solTNF, such as DN-TNFs, TNFR1 antagonists can block the binding of lymphotoxin-a (LT-a), another member of the TNF superfamily, to TNFR1. LT-a can have a proinflammatory role in RA and in animal disease models, such as CIA and EAE; thus, simultaneous blocking of TNF and LT-a binding to TNFR1 by TNFR1 antagonists can have additional benefits, in comparison to solTNF inhibition, in acute and chronic inflammatory diseases and disorders (see, e.g., Fischer et al. (2015) Antibodies 4:48-70).

### 2. TNFR2-Selective Agonists

[0696] CD4⁺FoxP3⁺regulatory T cells (Tregs) maintain immunological homeostasis and inhibit autoimmune responses; Tregs also modulate the antitumor immune response, allowing for tumor immune evasion. Tregs, thus, are a therapeutic target in the treatment of, for example, autoimmune and chronic inflammatory diseases and conditions, graft-versus-host disease (GvHD), transplantation rejection, and cancer. TNF signaling via TNFR2 regulates the function and activity of Tregs. TNFR2 agonists upregulate Treg activity, while TNFR2 antagonists downregulate Treg activity. The Treg-stimulatory effect of the TNF-TNFR2 signaling pathway can be leveraged for the treatment of several human diseases and disorders, including autoimmune and chronic inflammatory diseases, through agonism, and cancer, through antagonism (see, e.g., Zou et al. (2018) Front. Immunol. 9:594).

[0697] TNFR2 agonists include antibodies, such as monoclonal TNFR2 agonist antibodies, and antigen-binding fragments thereof, peptides and proteins, such as TNFR2-selective TNF muteins, fusion proteins, and small molecules. As provided herein, specific agonism of TNFR2 induces the expansion and activation of Tregs, which modulate the immune system, reduces the activity of autoreactive CD8⁺ T cells that damage tissues, and induces signaling pathways with anti-inflammatory, as well as cell survival, regeneration and protective effects, including neuro-protective, cardio-protective, gut-protective and osteo-protective effects. Thus, the enhancement of TNFR2 signaling with TNFR2-selective agonists can be used to enhance the therapeutic effects of TNFR1-specific antagonism, particularly in the treatment of autoimmune and chronic inflammatory diseases and disorders, including neurodegenerative diseases in which anti-TNF therapies/TNF-blockers have failed.

a. TNFR2 agonistic Antibodies

[0698] Human TNFR2-selective agonist antibodies include the commercially available MR2-1 (a monoclonal mouse IgG1 that binds human, cynomolgus monkey and rhesus monkey TNFR2; Hycult Biotech), and clone MAB2261 (a monoclonal mouse IgG2A that binds human TNFR2; R&D Systems). TNFR2 agonists, such as antibodies, can potently stimulate the expansion of homogeneous populations of FoxP3⁺Tregs in CD4 cell cultures, and upregulate the expression of TNF, TRAF2, TRAF3, BIRC3 (cIAP2) and FoxP3 mRNA. Magnetic-activated cell sorting (MACS)-purified CD4⁺CD25⁺cells, cultured using standard in vitro human Treg expansion protocols (i.e., with anti-CD3 antibodies, anti-CD28 antibodies, IL-2 and rapamycin), yield expanded Tregs with higher levels of FoxP3 (and other characteristic Treg markers), and more potent suppressive capacities, when expanded in the presence of a TNFR2 agonist antibody, compared to in the absence of the TNFR2 agonist. Tregs isolated from a patient with type 1 diabetes, that exhibit a resting phenotype, are activated and expanded upon in vitro treatment with a TNFR2 agonist antibody; such Tregs are more potent in the inhibition of autologous CD8⁺ T cells (see, e.g., Zou et al. (2018) Front. Immunol. 9:594).

[0699] Treatment of isolated Tregs, expanded using the standard in vitro protocol, with MR2-1, a commercially available agonistic human TNFR2 monoclonal antibody (mAb) containing a mouse IgG1, generates homogenous populations of FoxP3⁺Helios⁺CD127^{low} Tregs; these Tregs maintain their phenotype and highly suppressive activity in a humanized mouse model. TNFR2 agonists, thus, can enhance the ex vivo expansion of Treg cells from impure cell populations, for use in Treg-based immunotherapy (see, e.g., Zou et al. (2018) Front. Immunol. 9:594).

b. TNFR2-Selective TNF Muteins and Fusions Thereof

[0700] As described herein, TNF can be engineered to selectively bind TNFR1 or TNFR2; for example, a TNFR2 selective TNF mutein is a variant of TNF that contains one or more mutations that increase binding to TNFR2 and/or reduce or eliminate binding to TNFR1. TNFR2-selective mutations include non-conservative substitutions of the Asp residue at position 143 of soluble TNF (see, SEQ ID NO:2), such as, for example, D143Y, D143F or D143N, or non-conservative substitutions of the Ala residue at position 145 of soluble TNF, such as, for example, A145R (see, e.g., U.S. Pat. No. 9,081,017). Other mutations in TNF that impart selectivity for TNFR2 include, but are not limited to, for example, K65W, D143E, D143W, D143V, A145H, A145K, A145F, A145W, E146Q, E146H, E146K, E146N, D143N/A145R, A145R/S147T, Q88N/T89S/A145S/E146A/S147D, Q88N/A1451/E146G/S147D, A145H/E146S/S147D, A145H/S147D, L29V/A145D/E146D/S147D, A145N/E146D/S147D, A145T/E146S/S147D, A145Q/E146D/S147D, A145T/E146D/S147D, A145D/E146G/S147D, A145D/S147D, A145K/E146D/S147T, A145R/E146T/S147D, A145R/S147T, E146D/S147D, D143V/F144L/A145S, and D143V/A145S, with reference to SEQ ID NO:2 (see, e.g., U.S. Patent Publication No. 2020/0102362).

[0701] TNF ligand trimerization is essential for signaling via TNFRs. At low concentrations, such as in serum, the trimers dissociate, resulting in their degradation.

[0702] To generate functionally active, receptor-specific TNF muteins, it is necessary to create stable trimers. TNF07 is a soluble TNF (sTNF or solTNF) mutein, containing the mutations S95C/G148C (with respect to the sequence of residues set forth in SEQ ID NO:2), that forms a stable TNF trimer and functions as a TNFR2 agonist. The S95C/G148C mutations result in the formation of an intermolecular Cys-Cys covalent bond; a stable trimer is thus formed as a result of covalent internal disulfide cross-linking of sTNF at a strategic location between TNF monomers. TNF07 acts as a TNFR2 agonist despite lacking TNFR2-selective mutations. TNF07 induces potent TNFR2 signaling, expands FoxP3⁺Treg cells, and selectively induces the death of autoreactive CD8⁺ T cells isolated from patients with type 1 diabetes (see, e.g., Ban et al. (2015) Molecular and Cellular Therapies 3:7; Zou et al. (2018) Front. Immunol. 9:594).

[0703] Several TNFR2 agonists, containing fusions of single-chain TNFR2-selective TNF mutein trimers, with multimerization domains, have been generated. As described herein, the primary ligand for TNFR2 is membrane-bound TNF (memTNF; also referred to herein as transmembrane TNF or tmTNF). The addition of multimerization domains, such as dimerization or trimerization domains, generates hexameric or nonameric molecules, respectively, with respect to the TNF subunits; these hexamers and nonamers of TNF mimic membrane-bound TNF trimers and thus, are capable of effectively activating TNFR2 signaling. Commonly used dimerization domains include EHD2, which is derived from the heavy chain CH2 domain of IgE and MHD2, which is derived from the heavy chain CH2 domain of IgM. Dimerization domains also can include Fc domains, such as those derived from IgG1 and IgG4, optionally including modifications that alter immune effector functions. Commonly used trimerization domains include chicken tenascin C (TNC) and human TNC.

[0704] Dimerization and trimerization enhances TNFR2 signaling, and improves the half-life of the fusion protein, for example, by increasing the molecular weight of the molecule, and/or by introducing FcRn recycling, for example, when the dimerization domain is an Fc.

[0705] STAR2 (also known as TNC-sc-mTNF(221N/223R)) is a nonameric agonistic TNFR2-specific mouse TNF variant that does not bind TNFR1, and is a single-chain mouse TNF timer, where each TNF subunit is residues 91-235 of SEQ ID NO:5, fused to the trimerization domain of chicken tenascin C (cTNC), corresponding to residues 110-139 of SEQ ID NO:804 (see, also, SEQ ID NO:805). The three single-chain mouse TNF subunits are linked by two (GGGS)₄ peptide linkers (see, e.g., SEQ ID NO:707. Residues 116-120), and the TNC trimerization domain is linked to the N-terminus of the first TNF subunit in the single-chain trimer. The specificity of STAR2 for TNFR2 results from the mutations D221N and A223R (with reference to the sequence of mouse TNF, set forth in SEQ ID NO:5) within the individual TNF subunits, which creates a steric clash between STAR2 and mouse TNFR1. Fusion to the TNC trimerization domain causes spontaneous oligomer formation, creating three covalently linked TNF trimers, and mimicking membrane-bound TNF. STAR2 stimulates the proliferation of Tregs in vitro and in vivo in a TNFR2-dependent, IL-2-independent mechanism. Pretreatment of allogeneic hematopoietic stem cells with STAR2 prior to transplantation in mice prolonged the survival and decreased the severity of GvHD in a TNFR-2 and Treg-dependent manner. A human equivalent of the TNFR2-specific STAR2 agonist, TNC-scTNF(143N/145R), made of residues 9-157 of soluble TNF (see, SEQ ID NO:2), containing the mutations D143N/A145R with reference to SEQ ID NO:2 (solTNF), potently stimulated CD4⁺FoxP3⁺Treg expansion in vitro from CD4⁺ T cells isolated from healthy donors (see, e.g., Chopra et al. (2016) J. Exp. Med. 213(9):1881-1900; Zou et al. (2018) Front. Immunol. 9:594).

[0706] TNC-scTNF_{R2} is a soluble human TNFR2 agonist that is a fusion of the trimerization domain of human tenascin C (hTNC), containing residues 110-139 of SEQ ID NO:806 (see, also, SEQ ID NO:807), to the N-terminus of a TNFR2-selective single-chain TNF variant (scTNF_{R2}; SEQ ID NO:803), contains three TNF domains connected by two short peptide linkers (GGGGS). The TNFR2-selective TNF molecule, scTNF_{R2}, resembles soluble trimeric TNF, and each TNF subunit includes amino acids 80-233 of the full length TNF set forth in SEQ ID NO:1 (corresponding to residues 4-157 of SEQ ID NO:2), with the mutations D143N/A145R, with reference to SEQ ID NO:2, which eliminate binding to TNFR1. Because TNFR2 is only fully activated by membrane-bound TNF, but not soluble TNF trimers, the trimerization domain of TNC is fused to the N-terminus of scTNF_{R2}, generating TNC-scTNF_{R2}. TNC-scTNF_{R2} exists in a trimeric assembly of the single stranded fusion protein and resembles a nonameric TNF molecule; this oligomeric TNF mutein, due to its increased avidity, mimics membrane-bound TNF (memTNF) activity, induces the clustering of TNFR2 and the formation of TNFR2 signaling complexes, efficiently activating TNFR2. TNC-scTNF_{R2} exhibits neuroprotective properties; it preserves neurons from superoxide-induced cell death and rescues neurons from catecholaminergic cell death. In an in vitro model of Parkinson's disease, TNC-scTNFR2 rescued neurons after induction of cell death by 6-OHDA. These results indicate that TNC-scTNF_{R2} can ameliorate neurodegenerative processes (see, e.g., Fischer et al. (2011) PLoS ONE 6(11):e27621).

[0707] EHD2-scTNF_{R2} (see, SEQ ID NO:810) is an agonistic TNFR2-selective TNF mutein fusion protein that contains a covalently stabilized human TNFR2-selective single-chain TNF trimer (scTNF_{R2}; SEQ ID NO:803) with the mutations D143N/A145R (residue numbering with respect to soluble TNF, as set forth in SEQ ID NO:2), which abrogate binding to TNFR1, fused to the dimerization domain EHD2 (SEQ ID NO:808), which is derived from the heavy chain C_{H}2 domain of IgE, and creates a disulfide bonded dimer that contains hexameric TNF domains. Each TNF subunit within scTNF_{R2} contains residues 4-157 of SEQ ID NO:2. EHD2 is fused to the N-terminal end of the trivalent human single-chain scTNF_{R2} via a peptide linker (GGGSGGGSGGGSGGGSGGGSGGSEFLA; SEQ ID NO:809), and the three TNF domains of scTNF_{R2} are connected via two GGGGS peptide linkers. EHD2-scTNFR2 exhibits neuroprotective properties in a mouse model of NMDA-induced acute neurodegeneration (see, e.g., Dong et al. (2016) Proc. Natl. Acad. Sci. U.S.A. 113(43):12304-12309; and U.S. Patent Publication No. 2020/0102362).

[0708] TNFR2 agonist fusion proteins also include single chain TNFR2 agonists (scTNF_{R2}) containing three TNF muteins with the mutations D143N/A145R (with reference to SEQ ID NO:2), which abrogate binding to TNFR1, fused with a dimerization domain that is an Fc, resulting in a protein that is hexameric with respect to the TNF domains (scTNF_{R2}-Fc). The Fc can be an IgG4 or IgG1 Fc, optionally containing mutations that eliminate Fc effector functions, such as ADCC and CDC. The three TNF muteins, which contain residues 12-157 of SEQ ID NO:2, are linked together by two short peptide linkers, and the dimerization domain is linked to the N-terminus or C-terminus of the single chain trimeric TNF molecule (scTNF_{R2}) by a third short peptide linker. The three linkers can all be the same or can be different, and can include GS linkers, such as (GGGGS)~residues 116-121 of SEQ ID NO:707, and/or other combinations of Gly and Ser, where n=1-5, or can include all or a portion, at least 10, 15, or 20 contiguous residues, of the stalk region of TNF-α (GPQREEFPRDLSLISPLAQAVRSSSRTPSDK (SEQ ID NO:812), corresponding to residues 57-87 of SEQ ID NO:1). Dimerization enhances signaling by the TNFR2 agonist, and also improves the half-life of the fusion protein. Alternative dimerization domains that can be used in the fusion proteins include Fc fusion proteins derived from other dimerizing molecules, such as the IgE heavy chain domain 2 (EHD2; see, SEQ ID NO:808) and IgM heavy chain domain 2 (MHD2; see, SEQ ID NO:811) (see, e.g., International Application Publication No. WO 2019/226750).

### 3. Anti-TNFR2 Antagonistic Antibodies and Small Molecule Inhibitors

[0709] TNFR2 antagonists inhibit the proliferation of and induce the death of Tregs, and also can inhibit the proliferation of and induce the death of TNFR2-expressing tumor cells. TNFR2 antagonists can reduce or inhibit the proliferation of myeloid-derived suppressor cells (MDSCs), and/or induce apoptosis within MDSCs, by binding TNFR2 expressed on the surface of MDSCs present in the tumor microenvironment. TNFR2 antagonists also induce the expansion of T effector cells, including cytotoxic CD8⁺ T cells, via the inhibition of Treg expansion and activity. As a result, TNFR2 antagonists can be useful in the treatment of infectious diseases, and certain cancers that express TNFR2, such as, for example, T cell lymphomas (e.g., Hodgkin's lymphoma and cutaneous non-Hodgkin's lymphoma), ovarian cancer, colon cancer, multiple myeloma, renal cell carcinoma, breast cancer, cervical cancer, endometrial cancer, glioma, head and neck cancer, liver cancer, and lung cancer (see, e.g., U.S. Patent Publication No. 2019/0144556; Torrey et al. (2017) Sci. Signal. 10:eaaf8608).

[0710] As discussed herein, expression of TNFR2 is restricted to particular immune cells, including Tregs and MDSCs, endothelial cells, and particular neurons and cardiac cells. The restricted expression of TNFR2 makes it an ideal drug target, as systemic toxicity from anti-TNFR2 therapeutics is less likely to occur.

[0711] TNFR2 antagonist antibodies and antigen-binding fragments thereof bind epitopes within human TNFR2 that contain one or more of the residues KCRPG (corresponding to residues 142-146 of SEQ ID NO:4), or a larger epitope, containing residues 130-149, 137-144 or 142-149, or at least 5 continuous or discontinuous residues within these epitopes, for example, and do not bind to the epitope containing residues KCSPG (corresponding to residues 56-60 of SEQ ID NO:4). TNFR2 antagonists also can bind the TNFR2 epitopes PECLSCGS (corresponding to residues 91-98 of SEQ ID NO:4), RICTCRPG (corresponding to residues 116-123 of SEQ ID NO:4), CAPLRKCR (corresponding to residues 137-144 of SEQ ID NO:4), LRKCRPGFGVA (corresponding to residues 140-150 of SEQ ID NO:4), and VVCKPCAPGTFSN (corresponding to residues 159-171 of SEQ ID NO:4), and/or an epitope containing at least 5 continuous or discontinuous residues within residues 75-128, 86-103, 111-128, or 150-190 of SEQ ID NO:4 (see, e.g., U.S. Patent Publication No. 2019/0144556).

[0712] In general, antagonistic TNFR2 antibodies or antigen-binding fragments thereof bind to an epitope containing one or more residues of the KCRPG sequence (SEQ ID NO:840), with an affinity that is at least 10-fold greater, for example, than the affinity of the same antibody or antigen-binding fragment for a peptide that contains the KCSPG sequence of human TNFR2 (SEQ ID NO:839). Antibodies or antibody fragments that bind epitopes containing one or more residues of the KCRPG sequence, and epitopes containing the KCSPG motif with similar affinity (e.g., less than a 10-fold difference in affinity), are not antagonistic TNFR2 antibodies. Antagonistic TNFR2 antibodies include TNFRAB1 (see, SEQ ID NOs:1213 and 1213 for the sequences of the heavy and light chains of TNFRAB1, respectively), TNFRAB2 and TNFR2A3 (see, e.g., U.S. Patent Publication No. 2019/0144556 for descriptions of these antibodies). TNFR2 antagonists also include antibodies and antibody fragments that contain the CDR-H3 sequence of TNFRAB1 (QRVDGYSSYWYFDV; corresponding to residues 99-112 of SEQ ID NO:1212), TNFRAB2 (ARDDGSYSPFDYWG; SEQ ID NO:1217) or TNFR2A3 (ARDDGSYSPFDYFG; SEQ ID NO:1223), or a CDR-H3 sequence with at least about 85% sequence identity thereto. TNFRAB1, for example, specifically binds residues 130-149, containing residues KCRPG of TNFR2, with a 40-fold higher affinity than residues 48-67, containing residues KCSPG of TNFR2 (see, e.g., U.S. Patent Publication No. 2019/0144556).

[0713] TNFRAB1 (see, SEQ ID NOs: 1212 and 1213 for heavy and light chains, respectively) is a murine antibody that antagonizes the TNF-TNFR2 interaction, and, in addition to binding the KCRPG sequence of TNFR2, also binds an epitope within residues 161-169 (CKPCAPGTF; SEQ ID NO:1258) of TNFR2 (SEQ ID NO:4). TNFRAB2, another antagonistic TNFR2 antibody, binds the epitope containing residues 137-144 (CAPLRKCR; SEQ ID NO:851), as well as epitopes that include one or more residues within positions 80-86 (DSTYTQL; SEQ ID NO:1247), 91-98 (PECLSCGS; SEQ ID NO:1248), and 116-123 (RICTCRPG; SEQ ID NO: 1249) of human TNFR2. TNFR2A3 is a murine antagonistic human TNFR2 antibody that was discovered by immunization of a mouse with human TNFR2 and subsequent CDR mutagenesis, in which the CDR-H3 of the generated precursor antibody was replaced with the CDR-H3 sequence ARDDGSYSPFDYFG (SEQ ID NO:1223). TNFR2A3 binds to two distinct epitopes within human TNFR2; the first epitope includes residues 140-150 of human TNFR2 (LRKCRPGFGVA; SEQ ID NO:1463) and contains the KCRPG motif, and the second epitope is a downstream sequence that contains residues 159-171 of human TNFR2 (VVCKPCAPGTFSN; SEQ ID NO:1464). These data indicate that the CDR-H3 sequence of an antagonistic TNFR2 antibody largely dictates the antigen-binding properties, and that the CDR-H3 motif is a modular domain that can be substituted into anti-TNFR2 antibodies that do not exhibit antagonistic activity, in order to impart such antibodies or antigen-binding fragments thereof with TNFR2 dominant antagonistic features. For example, replacement of the CDR-H3 sequence of a neutral anti-TNFR2 antibody (i.e., an antibody that is neither antagonistic nor agonistic), with the CDR-H3 of an antagonistic TNFR2 antibody, such as the CDR-H3 sequences of TNFRAB1, TNFRAB2 or TNFR2A3, for example, converts the phenotype-neutral antibody to an antagonistic TNFR2 antibody, such as a dominant antagonistic TNFR2 antibody, which is an antagonist that inhibits TNFR2 activation even in the presence of a TNFR2 agonist, such as TNF, or IL-2 (see, e.g., U.S. Patent Publication No. 2019/0144556).

[0714] TNFR2 antagonist antibodies or antigen-binding fragments thereof can contain the CDR-H1 sequences set forth in any of SEQ ID NOs: 1214, 1215, and 1231-1233; the CDR-H2 sequences set forth in any of SEQ ID NOs: 1216, 1224, and 1230; the CDR-H3 sequences set forth in any of SEQ ID NOs: 1217, 1223, and 1225-1229, or the CDR-H3 of TNFRAB1, corresponding to residues 99-112 of SEQ ID NO:1212; the CDR-L1 sequences set forth in any of SEQ ID NOs: 1218 and 1234-1236, or the CDR-L1 sequence of TNFRAB1, corresponding to residues 24-33 of SEQ ID NO:1213; the CDR-L2 sequences set forth in any of SEQ ID NOs: 1219, 1220, 1237 and 1238, or the CDR-L2 sequence of TNFRAB1, corresponding to residues 49-55 of SEQ ID NO:1213; or the CDR-L3 sequences set forth in any of SEQ ID NOs: 1221, 1222, and 1241-1244, or the CDR-L3 sequence of TNFRAB1, corresponding to residues 88-96 of SEQ ID NO:1213. Exemplary framework regions that can be used for the development of a humanized anti-TNFR2 antibody, containing one or more of the above CDRs include, without limitation, those described in U.S. Pat. Nos. 7,732,578 and 8,093,068, and in International Application Publication No. WO 2003/105782. Another approach to engineering humanized anti-TNFR2 antagonistic antibodies is to align the sequences of the heavy chain variable region and light chain variable region of an antagonistic TNFR2 antibody, such as TNFRAB1, TNFRAB2, or TNFR2A3, with the heavy chain variable region and light chain variable region of a consensus human antibody. Consensus human antibody heavy chain and light chain sequences are known in the art (see e.g., the “VBASE” human germline sequence database; see also Kabat, et al., Sequences of Proteins of Immunological Interest, Fifth Edition, U.S. Department of Health and Human Services, NIH Publication No. 91-3242, (1991); Tomlinson et al., (1992) J. Mol. Biol. 227:776-798; and Cox et al., (1994) Eur. J. Immunol. 24:827-836). In this way, the variable domain framework residues and CDRs can be identified by sequence alignment. One can substitute, for example, the CDR-H3 of the consensus human antibody with the CDR-H3 of an antagonistic TNFR2 antibody, such as the CDR-H3 of TNFRAB1, TNFRAB2, or TNFR2A3, to produce a humanized TNFR2 antagonist antibody. Exemplary variable domains of a consensus human antibody include the heavy chain variable domain set forth in SEQ ID NO:1245, and the light chain variable domain set forth in SEQ ID NO:1246, identified in U.S. Pat. No. 6,054,297 (see, e.g., U.S. Patent Publication No. 2019/0144556). The CDR-H1 and CDR-H2 sequences of the exemplary consensus sequence of a human antibody heavy chain variable domain of SEQ ID NO:1245 can be replaced, for example, with the corresponding CDR sequences of a phenotype-neutral, TNFR2-specific antibody, and the CDR-L1, CDR-L2 and CDR-L3 sequences of the exemplary consensus sequence of a human antibody light chain variable domain of SEQ ID NO:1246 can be replaced with the corresponding CDR sequences of a phenotype-neutral, TNFR2-specific antibody, to produce humanized, antagonistic TNFR2 antibodies.

[0715] Other TNFR2 antagonists can be identified by screening for peptides that bind epitopes within TNFR2, such as those set forth in any one of SEQ ID NOs:1247-1464, by using techniques known in the art, for example, phage display, bacterial display, yeast display, mammalian display, ribosome display, mRNA display, and cDNA display, or any other methods known in the art, such as those described in U.S. Patent Publication No. 2019/0144556.

[0716] A human TNFR2 antagonist mAb, when added to standard Treg expansion culture conditions, inhibits the expansion of Tregs and reduces their suppressive activity (see, e.g., Zou et al. (2018) Front. Immunol. 9:594). Two potent, dominant anti-human TNFR2 antagonistic antibodies that outcompete TNF (the natural agonist of TNFR2), inhibit TNF-induced in vitro expansion of human Tregs, and can induce the death of Tregs in vitro. The TNFR2 antagonists bind TNFR2 specifically through the F(ab) region, independently of the Fc region or the crosslinking of antibodies, and block the binding of TNF to TNFR2 by binding to the antiparallel dimers of TNFR2. As a result, TNF-induced activation of NF-κB pathways in Tregs is inhibited, and conversion of transmembrane TNFR2 (tmTNFR2) to soluble TNFR2 (sTNFR2) is suppressed. Tregs isolated from ovarian cancer tissues were found to be more sensitive to TNFR2 antagonist mAb-induced cell death, due to higher levels of TNFR2 expression on tumor-infiltrating Tregs. The TNFR2 antagonists also induced the death of TNFR2⁺ OVCAR3 (ovarian cancer) tumor cells, which also express TNFR2. These results indicate the therapeutic potential for TNFR2 antagonists in the treatment of tumors, by targeting tumor-infiltrating Tregs as well as tumor cells (see, e.g., Zou et al. (2018) Front. Immunol. 9:594; Torrey et al. (2017) Sci. Signal. 10:eaaf8608).

[0717] In addition to anti-TNFR2 antagonistic mAbs, small molecules can inhibit TNFR2. For example, thalidomide is a small molecule synthetic glutamic acid derivative with immunomodulatory and anti-inflammatory properties; thalidomide and its structural analogs, lenalidomide and pomalidomide, are classified as immunomodulatory drugs. Thalidomide and its analogs inhibit TNF synthesis by downregulating NF-κB, destroying TNF mRNA, and targeting reactive oxygen species and α1-acid glycoprotein, and also, inhibit surface expression of TNFR2 on T cells by inhibiting intracellular TNFR2 transport to the cell surface. It has been shown that thalidomide reduces the number and function of Tregs in patients with chronic lymphocytic leukemia, and, in patients with acute myeloid leukemia, combination therapy with lenalidomide and azacitidine downregulates TNFR2 expression on CD4⁺ T cells and reduces the number of TNFR2⁺ Tregs, enhancing effector immune function. In patients with multiple myeloma, however, treatment with thalidomide and its analogs increased the number of Tregs, likely due to the elevated serum levels of TNF following treatment, indicating that the effects of thalidomide on TNFR2⁺ Tregs is disease specific (see, e.g., Zou et al. (2018)Front. Immunol. 9:594).

[0718] Another small molecule inhibitor of TNFR2 is panobinostat, a histone deacetylase inhibitor that can reduce FoxP3 expression and inhibit the suppressive activity of Tregs. Combination therapy with panobinostat and azacitidine reduces the numbers of TNFR2⁺ Tregs in the blood and bone marrow of patients with acute myeloid leukemia, and the resulting increase in IFNγ and IL-2 production by effector T cells results in a therapeutic effect in these patients (see, e.g., Zou et al. (2018) Front. Immunol. 9:594). Cyclophosphamide, a DNA alkylating agent commonly used as a cytotoxic chemotherapeutic in cancer treatment, can inhibit immunosuppressive function of Tregs at low doses, and depletes the maximally suppressive Tregs in mice bearing PROb colon cancer following the administration of a single dose, resulting in the activation of anti-tumor immune responses. In a mouse model of mesothelioma, cyclophosphamide treatment depleted TNFR2^{hi} Tregs. The combination of cyclophosphamide with etanercept inhibited the growth of established CT26 tumors in mice, by blocking TNF-TNFR2 interaction and eliminating TNFR2-expressing Treg activity (see, e.g., Zou et al. (2018) Front. Immunol. 9:594). Triptolide, an immunosuppressive molecule isolated from the Chinese herb Tripterygium wilfordii, inhibits TNF and TNFR2 expression in the colon of a mouse colitis model, and also, decreases the number of Tregs and inhibits tumor growth in mice with melanoma (see, e.g., Zou et al. (2018) Front. Immunol. 9:594).

### F. Selective Targeting of the TNFR1 and/or TNFR1 and TNFR2 Axis

[0719] As described herein, existing anti-TNF therapies, which block TNF and inhibit its signaling via TNFR1 and TNFR2, are limited in therapeutic efficacy, tolerability, and safety. Anti-TNF therapies ameliorate RA and other autoimmune and inflammatory diseases and conditions by preventing TNF signaling through TNFR1, and abrogating apoptotic and inflammatory pathways. These anti-TNF therapies, however, also block the beneficial effects of TNFR2 signaling, including the protective, pro-survival, regeneration-promoting and anti-inflammatory signaling pathways, as well as the TNFR2-associated expansion of immunosuppressive Tregs, resulting in serious, sometimes fatal, side effects, including serious infections. Other side effects associated with the use of TNF blocking therapies include congestive heart failure, liver injury, demyelinating disease/CNS disorders, lupus, psoriasis, sarcoidosis, and an increased susceptibility to the development of additional autoimmune diseases, as well as cancers, including lymphomas and solid malignancies. Anti-TNF therapies have failed in the treatment of demyelinating and neurodegenerative diseases, and can exacerbate disease symptoms.

[0720] Provided herein are constructs, including TNFR1 antagonist constructs, multi-specific, such as bi-specific, TNFR1 antagonist/TNFR2 agonist constructs, and nucleic acids and methods for the selective inhibition of TNF signaling via TNFR1 (see, e.g., FIG. 2, which depicts an exemplary bi-specific construct). Also provided are constructs and methods for selective inhibition of TNF signaling via TNFR1, including while maintaining or enhancing TNFR2 signaling. These constructs and methods provide improved therapeutic approaches for the treatment of diseases and disorders of the TNF/TNFR1 axis. These therapeutic approaches include, but are not limited to treatments of autoimmune, chronic inflammatory, neurodegenerative, and demyelinating, diseases, disorders and conditions, and cancer, which also has an inflammatory component. As described herein, concomitant or sequential selective agonism of TNFR2 with TNFR1 antagonism has therapeutic effects, and can enhance the therapeutic index of selective TNFR1 antagonists, by activating desirable signaling pathways, such as anti-inflammatory pathways and NF-κB pathways that control cell survival and proliferation, and by inducing the expansion of immunosuppressive Tregs that remove excess autoreactive/effector T cells that result in tissue destruction, from the autoimmune microenvironment. As with all embodiments herein the TNFR1 antagonists are selected or designed or identified so that they do no exhibit TNFR1 agonist activity, including in bivalent or other multivalent configurations.

[0721] Sections 1 and 2 describe methods that target each of TNFR1 and TNFR2; section 3 provides an overview of constructs provided herein that solve the problems of prior approaches, particularly those that targeted TNFR1; and Section 4 describes the structure and components of constructs provided herein.

1. Selective Blockade of TNFR1 with TNFR1 antagonists

[0722] The use of multivalent agents, such as antibodies against TNFR1, however, is not feasible. The TNF trimer binds to three TNFR1 chains as a preligand assembly complex, mediated by the preligand assembly domains (plads) of each monomeric TNFR. This differs from most receptor systems where ligand binding is required before clusters form on the surface of the cell. The TNF receptors are single transmembrane glycoproteins with about 28% homology mostly in their extracellular domain with both receptors containing four tandemly repeated cysteine rich motifs. Their intracellular sequences are largely unrelated with almost no homology between each other, and early work indicated delineation of their signaling functions (Grell et al. (1994) J. Immol. 153(5):1963-72). They contain several motifs with known functional significance. Each of TNFR1 and TNFR2 contains an extracellular pre-ligand-binding assembly domain (PLAD) domain (distinct from ligand binding regions) that precomplexes receptors. Conformational changes are induced when the trimeric TNF ligand binds to the TNFR trimer in the cell membrane, resulting in signal activation (MacEwan (2002) Br J Pharmacol. 135(4):855-875; and Lo et al. (2019) Sci Signal. 12(592):eaav5637).

[0723] As a result, antibodies and other multivalent agents that bind to TNFR1 likely are not suitable for use as antagonists, because they can cause super-clustering leading to activation of TNFR signaling. Monovalent antagonists, such as single domain antibodies (dAbs or sdAbs), nanobodies (Nbs; camelid single domain antibodies), scFv fragments, and Fab fragments, on the other hand, bind to one TNFR1 molecule, and do not induce cross-linking or clustering of the receptor on cell surfaces, abrogating any activation of TNFR1 signaling. Monovalent antagonists can bind to domain 1, 2, 3 or 4, or to an epitope spanning multiple domains, of the TNFR1 extracellular domain (see, e.g., U.S. Pat. Nos. 9,028,817 and 9,028,822), but these existing antagonists were ineffective therapeutics. Among a variety of problems were the short serum-half-lives, and immunogenicity, and other problems. Selective blockade of TNFR1 can be achieved with TNFR1 antagonists with properties described and provided herein. In all embodiments described above and below, the TNFR1 antagonists are those that also do not have TNFR1 agonist activity, such as when in a bivalent construct. These include TNFR1 antagonists that bind to the same epitope as the constructs, such as the EN1206 constructs, that contain the dAb of SEQ ID NO:59.

2. Selective Activation of TNFR2 with TNFR2 agonists

[0724] As described herein, selective activation of TNFR2 can be achieved using TNFR2-specific agonists, which can include, for example, TNFR2 agonistic antibodies and antigen-binding fragments thereof, and TNFR2-selective TNF muteins and fusion proteins thereof. Antigen-binding fragments of antibodies that bind to the first and/or second epitope of human TNFR2 can be used. The first epitope of TNFR2 includes amino acid residues 48-67 of SEQ ID NO:4, and the second epitope includes position 135 of SEQ ID NO:4, including, for example, residues 128-147, 130-149, 135-147, or 135-153, of SEQ ID NO:4 (see, e.g., International Application Publication No. WO 2014/124134; and U.S. Pat. No. 9,821,010). Other epitopes on TNFR2 have been identified and can be used to design antigen-binding fragments with TNFR2-selectivity, as discussed below.

[0725] In contrast to the antagonism of TNFR1, to agonize TNFR2, dimeric and trimeric molecules are used that mimic the action of membrane-bound TNF, which is the primary ligand that activates TNFR2. As such, TNFR2 agonists include TNFR2-selective TNF muteins and antibody fragments. Exemplary are TNF mutein and antibody fragments that fused with multimerization domains, particularly dimerization or trimerization domains, as discussed below. For extending half-lives of these molecules they can be associated with or coupled to polyethylene glycol with or without cleavable linkers (see, e.g., Santi et al. (2012) Proc. Natl. Acad. Sci. U.S.A. 109:6211-6216), or fused or bound to half-life extender proteins or peptides, such as human serum albumin (with or without FcRn optimization, and with or without itself being PEGylated); and ADCC-inactivated/FcRn optimized Fe domains of antibodies with or without PEGylation (reviewed, for example, in Strohl (2015) BioDrugs 29(4):215-239). Half-life extenders, include, for example, PEGylation, modification of glycosylation, sialyation, PASylation (polymers of PAS amino acids about 100-200 residues in length), ELPylation (see, e.g., Floss et al. (2010) J. Trends Biotechnol. 28(1):37-45), HAPylation (glycine homopolymer), fusion to human serum albumin, fusion to GLK, fusion to CTP, GLP fusion, fusion to the constant fragment (Fc) domain of a human immunoglobulin (IgG), fusion to transferrin, fusion to non-structured polypeptides such as XTEN (also referred to as rPEG, genetic fusion of non-exact repeat peptide sequence, containing A, E, G, P, S, and T, see, e.g., Schellenberger et al. (2009) Nat Biotechnol. 27(12):1186-90), and other such modifications and fusions that increase size, increase hydrodynamic radius, alter charge, or target to receptors for recycling rather than clearance, and combinations of such modifications. Particular examples of extenders of half-life are discussed and exemplified in detail below.

3. TNFR1 antagonist constructs, TNFR2 agonist constructs; Multi-Specific, Including Bi-Specific, TNFR1 Antagonist and TNFR2 Agonist Constructs

[0726] Thus, provided herein are constructs for inhibiting TNFR1 signaling/activity and/or inhibiting TNFR1 and for agonizing TNFR2. Included among the constructs provided herein are constructs, discussed below, that are multi-specific, such as bi-specific that inhibit TNFR1 signaling and agonize TNFR2. Care is taken in designing these constructs, since bispecific antagonists TNFR1 or TNFR2 can inhibit the ability of TNF to induce activating changes in conformation of the resting trimeric TNFR, thus preventing its signaling. Other multimeric molecules risk the aggregation of receptors, thus forcing the TNFR to signal for cellular inflammation and apoptosis. Multi-specific constructs herein generally target different receptors, such as each of TNFR1 and TNFR2. By inhibiting TNFR1 signaling, and advantageously agonizing TNFR2 activity, this provides improved treatments of diseases, conditions, and disorders in which TNF is involved.

[0727] Among the constructs provided herein are TNFR1 antagonist constructs. These include fusion protein constructs, such as TNFR1 antagonist-Fc fusion constructs. As described herein, and exemplified in the Examples, TNFR1 antagonists that specifically target TNFR1, without antagonizing or without substantially antagonizing TNFR2, or that include or exhibit TNFR2 agonist activity can be selected, generated, or designed. The TNFR1 antagonist constructs improve the therapeutic efficacy and safety of prior TNFR1 antagonists, including monovalent antagonists, such as the dAbs, scFvs and Fabs.

[0728] Also provided are selective TNFR2 agonist constructs, such as TNFR2-Fc fusion constructs that improve the therapeutic efficacy of prior TNFR2 agonists. For example, as shown herein, the half-life of the Fc fusion constructs increases the half-life of prior TNFR1 antagonists or TNFR2 agonists, which, for example, reduces the frequency of dosing, improves patient compliance, and improves the therapeutic index. Also provided are selective TNFR2 agonist constructs, such as TNFR2-Fc fusion constructs that improve the therapeutic efficacy of prior TNFR2 agonists. For example, as shown herein, the half-life of the Fc fusion constructs increases the half-life of prior TNFR1 antagonists or TNFR2 agonists, which, for example, reduces the frequency of dosing, improves patient compliance, and improves the therapeutic index. Alternative candidate half-life extenders including PEGylating and fusion to peptides, are discussed above, and exemplary extenders are detailed below (reviewed in, Strohl (2015) BioDrugs 29(4):215-239, see also, Tan et al. (2018) Current Pharmaceutical Design 24:4932-4946), but also includes PEGylation using linear or branched PEG (see, e.g., Swierczewska et al. (2015) Expert Opin Emerg Drugs 20(4):531-536).

[0729] The TNFR1 antagonist constructs include an optional linker and an optional activity modifier. They can be assembled in any order. The structure of TNFR1 antagonist constructs can be represented by the formulae 1:

(TNFR1 inhibitor)ₙ-linkerₚ-(activity modifier)_{q}, formula 1a, or

(activity modifier)g-linkerₚ-(TNFR1 inhibitor)ₙ, formula 1b, where:

each of n and q is an integer, and each is independently 1, 2, or 3; p is 0, 1, 2 or 3; and an activity modifier is a moiety, such as a polypeptide, such as albumin, or an Fc that is modified to have reduced or no ADCC activity, that increases serum half-life of the TNFR1 inhibitor; and the TNFR1 inhibitor is a molecule, such as a polypeptide or small drug molecule that binds to TNFR1 and inhibits its activity. The activity modifier is not a human serum albumin antibody or an unmodified Fc. Also provided are the TNFR2 agonists of formula 3: (TNFR2 agonist)ₙ-linkerₚ-(activity modifier)_{q}, where n, p and q, the linker, and the activity modifier, are as set forth for formula 1.

[0730] Also provided are multi-specific, including bi-specific, constructs that contain an TNFR1 antagonist (a TNFR1 inhibitor) and an TNFR2 agonist, linked directly or via a linker. Such constructs can include a TNFR1 antagonist of the above formula or can have a structure as set forth in formula 2 below. The bi-specific and multi-specific constructs selectively inhibit inflammatory and deleterious TNFR1 signaling, enhance protective and anti-inflammatory TNFR2 signaling. They include moieties that provide for advantageous pharmacokinetic properties, including increased serum half-life and stability, and reduced peripheral clearance, compared with prior TNFR1 antagonists and TNFR2 agonists.

[0731] The structure of the multi-specific, such as, bi-specific, molecules/constructs provided herein is represented by the following formula (Formula 2):

(TNFR1 inhibitor)ₙ-(activity modifier)ᵣ₁-Linker (L)ₚ-(activity modifier)ᵣ₂-(TNFR2 agonist)_{q},

where n=1, 2, or 3, p=1, 2, or 3, r1 and r2 each independently=0, 1, 2, and q=0, 1 or 2.

[0732] As with formulae 1, the order of components can vary. The linker can contain a plurality of components, such as a GS linker, a polymeric moiety, such as a PEG, or other such linker, or a hinge region, or other combinations of components, and the activity modifier is a moiety that modify the activity of the construct, such as an Fc region, or a modified Fc region, or a polypeptide increases half-life, or resistance to endogenous inhibitors. The components of formulae 1 and 2 can be polypeptides or can contain other molecules, such as small drugs that specifically bind or a chemical linker, or a non-peptidic activity modifier. Examples of each component are described below.

### 4. Components of the TNFR1 Antagonist Constructs

[0733] Description of and examples of the constructs, and each component of the constructs provided herein are described in the sections below. Exemplary forms of each construct are depicted and described by formulae 1 and 2, above, and 3 and 4, below.

a. TNFR1 Inhibitor Moiety (TNFR1 Antagonist)

[0734] The TNFR1 inhibitor moiety in formula 1, above, and in the multi-specific molecules/constructs (formula 2, above) provided herein is any molecule, including a polypeptide or small molecule, that inhibits TNFR1 signaling. This includes a TNFR1 inhibitor that selectively inhibits TNFR1 signaling, without inhibiting TNFR2 signaling.

[0735] In order to avoid receptor clustering, which agonizes TNFR1, the TNFR1 antagonist construct generally is monomeric/monovalent. The TNFR1 antagonist inhibitor component of the construct can be one that is known to have TNFR1 antagonist activity, or can be identified, such as by selecting from a library, such as a phage library, an antibody library, or an aptamer library. Among the TNFR1 inhibitor moieties are those that are modified or selected to have increased specificity or affinity for TNFR1, and, have no or little (such that the adverse side effects from such activity are less than grade 2, and generally grade 1 or less based on the NCI Common Terminology Criteria for Adverse Events (CTCAE) grading system) agonist activity for TNFR1, and optionally also have agonist activity for TNFR2. In those instances, the TNFR1 inhibitor moiety can be provided as a single chain antibody or in any of the other forms described herein, including, such as linked to a half-life extender, such as any described above and below, such as a modified Fc region or Fc dimer, or to another moiety or moieties that increase(s) serum half-life.

[0736] For example, as provided herein, the TNFR1 inhibitor component of the TNFR1 antagonist construct can be or can include a human domain antibody (dAb) that specifically binds to TNFR1. The dAb can contain a variable-region heavy chain (V_{H}) or light chain (V_{L}) domain. dAbs for use herein include, for example, dAbs designated DOM1 h-574-208 (SEQ ID NO:54) (from DMS5541; see, SEQ ID NO:38), GSK1995057 (see, SEQ ID NO:55) and GSK2862277 (see, SEQ ID NO:56), as well as the dAbs set forth in any of SEQ ID NOs: 57-672 (see, e.g., U.S. Pat. Nos. 9,028,817 and 9,028,822; U.S. Publication Nos.: 2006/0083747, 2010/0034831, and 2012/0107330; and International Application Publication Nos.: WO 2004/058820, WO 2004/081026, WO 2005/035572, WO 2006/038027, WO 2007/049017, WO 2008/149144, WO 2008/149148, WO 2010/094720, WO 2011/051217, WO 2011/006914, WO 2012/172070, WO 2012/104322, and WO 2015/104322, and other related family member applications and patents; see, also Enever et al., (2015) Protein Engineering, Design & Selection 28(3):59-66, which provides sequences and discussion of various dAbs). Provided are Vhh dAbs that contain a heavy chain. These dAbs can be linked directly or indirectly to a moiety, such as Fc or HSA, that increases serum half-life, and also that can impart other properties or activities to a construct.

[0737] The anti-TNFR1 inhibitor component can be or include a nanobody. Exemplary of these are (Nbs) Nb 70 and/or Nb 96 (see, SEQ ID NOs: 683 and 684, respectively). These dAbs and Nbs are surveyed for immunogenicity, and, if needed, using molecular modeling and mutagenesis, are modified to remove predicted immunogenic sequences. Immunogenic sequences can be eliminated by standard methods known in the art. For example, identify the potentially antigenic peptides, and make of conservative replacements of each amino acid to identify those that are not antigenic and that retain activity. Other methods are known (see, e.g., Schubert et al. (2018)PLoS Comput Biol. 14(3):e1005983), which describes a method for de-immunizing proteins). They also are modified so that in any bivalent format they do not have TNFR1 agonist activity.

[0738] Thus, for example, the TNFR1 antagonist dAb portion, can be the dAb set forth in any of SEQ ID NOs: 54-672, or a dAb with about or at least about 85%, 90%, 95%, 98%, 99%, or greater, sequence identity to a dAb set forth in any of SEQ ID NOs: 54-672, or a TNFR1 antagonist dAb known to those of skill in the art.

[0739] Other TNFR1 antagonists include, for example, antigen-binding antibody fragments. For example, the TNFR1 antagonist can be a Fab fragment, Fab′ fragment, single-chain Fv (scFv), disulfide-linked Fv (dsFv), Fd fragment, Fd′ fragment, single-chain Fab (scFab), hsFv (helix-stabilized Fv), a free light chain, or antigen-binding fragments of any of the above. It also can include linkers, such as GS linkers within the construct, for example, to increase flexibility.

[0740] For example, the TNFR1 inhibitor portion of the antagonist can contain antigen-binding fragments from the TNFR1 antagonistic antibody designated ATROSAB. The fragments include one or more (or all) of the heavy chain or light chain CDRs of ATROSAB, or CDRs that exhibits at least 85%, 90%, 95% or more sequence identity thereto (e. g., 85%, 90%, 95%, 96%, 97%, 98%, 99% or more sequence identity). The TNFR1 antagonist can contain the V_{H} (residues 1-115 of SEQ ID NO:31) and/or V_{L} (residues 1-113 of SEQ ID NO:32) of ATROSAB, or a V_{H} or V_{L} containing at least 85%, 90%, 95%, or more, sequence identity to the V_{H} or V_{L} of ATROSAB. For example, it can contain a dAb derived from ATROSAB. The TNFR1 antagonist can contain other monovalent antibody fragments of ATROSAB, including, for example, Fab or scFv fragments, such as the ATROSAB Fab (FabATR) light and heavy chains set forth in SEQ ID NOs: 679 and 680, respectively, or the ATROSAB scFv (scFv IZI06.1) set forth in SEQ ID NO:673. For example, the scFv contains the V_{H} domain, corresponding to residues 1-115 of the ATROSAB heavy chain (see, SEQ ID NO:31), linked by a short peptide linker (e.g., GGGGSGGGGSGGSAQ, as in SEQ ID NO:673, or a linker set forth in any of SEQ ID NOs:813-834) to the V_{L} domain, corresponding to residues 1-113 of the ATROSAB light chain (see, SEQ ID NO:32). The TNFR1 antagonist can contain variants of the ATROSAB scFV with increased affinity or selectivity or both for TNFR1, including scFv IG11, which includes or has the sequence set forth in SEQ ID NO:674, scFv T12B, containing the sequence set forth in SEQ ID NO:675, or scFv 13.7, containing the sequence set forth in SEQ ID NO:676, or variants containing at least 90% sequence identity to the sequences of scFv IG11, scFv T12B, and scFv 13.7. The TNFR1 antagonist also can include the sequence of amino acid residues from the Fab 13.7 light and heavy chains (derived from scFV 13.7), as set forth in SEQ ID NOs: 681 and 682, respectively.

[0741] TNFR1 inhibitors in the TNFR1 antagonist construct also include TNF variants (muteins) that bind to TNFR1 to reduce or inhibit signaling. These include, for example, TNF variants (muteins), such as, but not limited to, TNF variants containing one or more of the mutations L29S, L29G, L29Y, R31E, R31N, R32Y, R32W, S86T, L29S/R32W, L29S/S86T, R32W/S86T, L29S/R32W/S86T, R31N/R32T, R31E/S86T, R31N/R32T/S86T, and E146R, with reference to SEQ ID NO:2, which impart selectivity to TNFR1. The TNFR1 antagonist can contain, for example, the TNFR1-selective antagonistic TNF mutein derived from the mutein designated XPro1595 (see, SEQ ID NO:701). XPro1595 contains the mutations ViM, R31C, C69V, Y87H, C101A and A1456R, with reference to SEQ ID NO:2. Other exemplary TNFR1-selective antagonistic TNF muteins are derived from XENP345 (see, SEQ ID NO:702), which contains the mutations I97T/A145R, with reference to SEQ ID NO:2; and the TNFR1-selective antagonistic TNF mutein designated R1antTNF (see, SEQ ID NO:703), which contains the mutations A84S, V85T, S86T, Y87H, Q88N and T89Q, with reference to SEQ ID NO:2. TNFR1 inhibitors to be used in the TNFR1 antagonists also include small molecule inhibitors that can be chemically conjugated to a linker.

[0742] As described herein, see e.g., the Examples, the TNFR1 inhibitor (antagonist) moiety can be modified to improve its specificity/selectivity for TNFR1, and also, optionally can be modified to have TNFR2 agonist activity. TNF binds to TNFR1 with low pM affinity (K_{d} 19 pM); in general the antagonists herein have at least the same affinity as TNF, unless its activity is due to ‘locking’ the receptor in an inactive conformation, then it is not necessary since the receptors become locked. TNFR1 antagonist constructs provided herein, include those that specifically bind to TNFR1 with a K_{D} value of less than or less than about 100 nM (e.g., less than or equal to: 95 nM, 90 nM, 85 nM, 80 nM, 75 nM, 70 nM, 65 nM, 60 nM, 55 nM, 50 nM, 45 nM, 40 nM, 35 nM, 30 nM, 25 nM, 20 nM, 15 nM, 10 nM, 5 nM, 4 nM, 3 nM, 2 nM, or 1 nM). In certain embodiments, the TNFR1 antagonists specifically bind to TNFR1 with a K_{D} value of less than 1 nM (e.g., less than or equal to: 990 pM, 980 pM, 970 pM, 960 pM, 950 pM, 940 pM, 930 pM, 920 pM, 910 pM, 900 pM, 890 pM, 880 pM, 870 pM, 860 pM, 850 pM, 840 pM, 830 pM, 820 pM, 810 pM, 800 pM, 790 pM, 780 pM, 770 pM, 760 pM, 750 pM, 740 pM, 730 pM, 720 pM, 710 pM, 700 pM, 690 pM, 680 pM, 670 pM, 660 pM, 650 pM, 640 pM, 630 pM, 620 pM, 610 pM, 600 pM, 590 pM, 580 pM, 570 pM, 560 pM, 550 pM, 540 pM, 530 pM, 520 pM, 510 pM, 500 pM, 490 pM, 480 pM, 470 pM, 460 pM, 450 pM, 440 pM, 430 pM, 420 pM, 410 pM, 400 pM, 390 pM, 380 pM, 370 pM, 360 pM, 350 pM, 340 pM, 330 pM, 320 pM, 310 pM, 300 pM, 290 pM, 280 pM, 270 pM, 260 pM, 250 pM, 240 pM, 230 pM, 220 pM, 210 pM, 200 pM, 190 pM, 180 pM, 170 pM, 160 pM, 150 pM, 140 pM, 130 pM, 120 pM, 110 pM, 100 pM, 90 pM, 80 pM, 70 pM, 60 pM, 50 pM, 40 pM, 30 pM, 20 pM, 10 pM, 5 pM, or 1 pM).

[0743] The TNFR1 antagonist constructs provided herein also are selected or designed so that they lack or have reduced binding for other TNFR superfamily members. For example, they are assessed to identify those that do not specifically bind to another TNFR superfamily member, such as TNFR2, using any suitable in vitro binding assay. Assays include, for example, ELISA-based methods. For example, the TNFR1 antagonist constructs can specifically bind to human TNFR1 or a TNFR1-derived peptide, with an affinity that is greater than the affinity for another family member or corresponding peptide thereof. The increased affinity is, for example, at least or at least about 5-fold greater (e.g., at least or equal to 5-fold greater, 6-fold greater, 7-fold greater, 8-fold greater, 9-fold greater, 10-fold greater, 20-fold greater, 30-fold greater, 40-fold greater, 50-fold greater, 60-fold greater, 70-fold greater, 80-fold greater, 90-fold greater, 100-fold greater, 200-fold greater, 300-fold greater, 400-fold greater, 500-fold greater, 600-fold greater, 700-fold greater, 800-fold greater, 900-fold greater, 1,000-fold greater, 2,000-fold greater, 3,000-fold greater, 4,000-fold greater, 5,000-fold greater, 6,000-fold greater, 7,000-fold greater, 8,000-fold greater, 9,000-fold greater, 10,000-fold greater, or more), than the affinity of the TNFR1 antagonist for another TNFR superfamily member, such as TNFR2.

[0744] Among the TNFR1 antagonist constructs provided herein are those that exhibit high kₒₙ and low k_{off} values upon interaction with TNFR1, consistent with high-affinity receptor binding. For example, the TNFR1 antagonist constructs provided herein can exhibit kₒₙ values in the presence of TNFR1 of greater than or equal to, or greater than, about 10⁴ M⁻¹s⁻¹ (e.g., greater than or equal to 1.0×10⁴ M⁻¹s⁻¹, 1.5×10⁴ M⁻¹s⁻¹, 2.0×10⁴ M⁻¹s1, 2.5×10⁴ M⁻¹s⁻¹, 3.0×10⁴M⁻¹s1, 3.5×10⁴ M⁻¹s⁻¹, 4.0×10⁴ M-s⁻¹, 4.5×10⁴ M⁻¹s¹, 5.0×10⁴ M⁻¹s¹, 5.5×10⁴ M⁻¹s¹, 6.0×10⁴ M⁻¹s¹, 6.5×10⁴ M⁻¹s1, 7.0×10⁴ M⁻¹s1, 7.5×10⁴ M⁻¹s⁻¹, 8.0×10⁴ M⁻¹s1, 8.5×10⁴ M⁻¹s⁻¹, 9.0×10⁴ M⁻¹s⁻¹ 9.5×10⁴ M⁻¹s⁻¹, 1.0×10⁵ M⁻¹s¹, 1.5×10⁵ M⁻¹s¹, 2.0×10⁵ M⁻¹s¹, 2.5×10⁵ M⁻¹s¹, 3.0×10⁵ s⁻¹, 3.5×10⁵ M⁻¹s¹, 4.0×10⁵ M⁻¹s⁻¹, 4.5×10⁵ M⁻¹s¹, 5.0×10⁵ M⁻¹s¹, 5.5×10⁵ M⁻¹s⁻¹, 6.0×10⁵ M⁻¹s1, 6.5×10⁵ M⁻¹s1, 7.0×10⁵ M⁻¹s⁻¹, 7.5×10⁵ M⁻¹s⁻¹, 8.0×10⁵ M⁻¹s⁻¹, 8.5×10⁵ M⁻¹s⁻¹, 9.0×10⁵ M⁻¹s⁻¹, 9.5×10⁵ M⁻¹s⁻¹, 1.0×106 M⁻¹s⁻¹). For example, the TNFR1 antagonists provided herein can exhibit k_{off} values, when complexed to TNFR1, of less than or equal to, or less than about 10⁻³ s⁻¹ (e.g., less than or less than about 1.0×10⁻³ s⁻¹, 9.5×10⁻⁴ s⁻¹, 9.0×10⁻⁴ s⁻¹, 8.5×10⁻⁴s⁻¹, 8.0×10⁻⁴ s⁻¹ 7.5×10⁻⁴ s⁻¹ 7.0×10⁻⁴ s⁻¹ 6.5×10⁻⁴s⁻¹ 6.0×10⁻⁴s⁻¹ 5.5×10⁻⁴ s⁻¹ 5.0×10⁻⁴s⁻¹ 4.5×10⁻⁴ s⁻¹ 4.0×10⁻⁴s⁻¹, 3.5×10⁻⁴ s⁻¹ 3.0×10⁻⁴s⁻¹, 2.5×10⁻⁴s⁻¹ 2.0×10⁻⁴ s⁻¹ 1.5×10⁻⁴ s⁻¹ 1.0×10⁻⁴s⁻¹ 9.5×10⁻⁵ s⁻¹ 9.0×10⁻⁵ s⁻¹ 8.5×10⁻⁵s⁻¹ 8.0×10⁻⁵s⁻¹ 7.5×10⁻⁵ s⁻¹ 7.0×10⁻⁵ s⁻¹ 6.5×10⁻⁵s⁻¹ 6.0×10⁻⁵s⁻¹ 5.5×10⁻⁵ s⁻¹ 5.0×10⁻⁵ s⁻¹ 4.5×10⁻⁵ s⁻¹ 4.0×10⁻⁵ s⁻¹, 3.5×10⁻⁵ s⁻¹, 3.0×10⁻⁵ s⁻¹, 2.5×10⁻⁵s⁻¹, 2.0×10⁻⁵s⁻¹, 1.5×10⁻⁵s⁻¹, or 1.0×10⁻⁵s⁻¹).

[0745] The C-terminus of the TNFR1 antagonist (TNFR1 inhibitor portion of the construct of formula 1 and also formula 2), such as any of the TNFR1 antagonist constructs described herein, can be linked, directly, or more generally via a linker or combination of linker elements, to an activity modifier, or fused with the N-terminus of an TNFR2 agonist (or to a small molecule TNFR2 agonist) via one or more linkers, as discussed below and elsewhere herein. Alternatively, the N-terminus of the TNFR1 inhibitor moiety can be fused to the C-terminus of the TNFR2 agonist, or the C-terminus of the TNFR1 inhibitor moiety (or to a small molecule TNFR2 agonist) can be fused directly or via linker to the activity modifier or to a linker.

[0746] The linkers (L), discussed in more detail below, are any that improve pharmacological properties, including increasing stability and flexibility and decreasing steric hindrance, and optionally conferring additional properties on the constructs. The linkers can include more than one component, where each component confers a particular property, For example, the TNFR1 antagonists can include any one or more of an Ig Fc region, and/or an antibody hinge region, and/or a short peptide linker, such as a glycine-serine linker. The Fc regions are modified, for example, to eliminate or reduce ADCC activity, and/or to alter receptor binding, and/or for other such activities and properties. Linkers, as discussed below, also include chemical linkers. For example, in some embodiments, the linker is a poly(ethylene glycol) (PEG) molecule, or a branched PEG molecule, such as those whose molecular mass is at or about 30 kDa or more.

b. Linkers

[0747] The TNFR1 antagonist constructs optionally include linkers, as well as activity modifiers. The linkers have a variety of functions, including provision of additional or improved biological and pharmacological properties, and for structural purposes for linking different molecules. Exemplary linkers are Gly-Ser polypeptides, hinge regions (see, e.g., Tables 1-4 above, which set forth the sequences of various hinge regions, and combinations thereof).

[0748] Included are polypeptide linkers and also chemical linkers for chemical conjugation. Linker peptides are included as spaces between polypeptides, and can promote proper protein folding and stability of the polypeptides, improve protein expression, and enhance the bioactivity of the components of the constructs. Peptide linkers primarily are designed to be unstructured, flexible peptides. Linkers can be included as set forth in exemplary formulae 1-4, above. For example, in the bi-specific constructs provided, the components are fused via a linker (L) in an N-terminus to C-terminus, or C-terminus to N-terminus configuration. The linker generally is a peptide linker, including a polypeptide, such as an Fc region, alone, or in combination with one or more other linkers, including, for example, short peptide linkers, such as a glycine-serine (GS) linker, and/or the hinge region of an immunoglobulin (Ig). In embodiments herein, for example, the C-terminus of the TNFR1 antagonist is fused to the N-terminus of the peptide linker(s), and the C-terminus of the peptide linker(s) is fused with the N-terminus of the TNFR2 agonist. In other embodiments, the C-terminus of the TNFR2 agonist is fused to the N-terminus of the peptide linker(s), and the C-terminus of the peptide linker(s) is fused with the N-terminus of the TNFR1 antagonist. The linker provides increased molecular weight, increasing the stability and serum half-life, enhancing tissue retention, and reducing or decreasing peripheral elimination, thereby improving the therapeutic index of the molecule. The linker also increases the flexibility of the molecule, allowing each portion of the molecule to interact with its target antigen/epitope, such as TNFR1 and TNFR2, as provided herein. As discussed below and elsewhere herein, in embodiments where the linker contains an Fc region of an immunoglobulin, generally a modified Fc region, additional properties can be imparted, including, for example, neonatal Fc receptor (FcRn) recycling, which further increases serum stability and half-life, and/or the enhancement or elimination of immune effector functions.

i. Peptide Linkers

[0749] Linkers for fusion proteins are well known to those of skill in the art (see, e.g., Chen et al (2013) Adv. Drug. Deliv. Rev. 65:1357-1369, entitled “Fusion Protein Linkers: Property, Design and Functionality”). Linkers can be designed or can be from or based on linkers from naturally-occurring multi-domain proteins. Empirical linkers designed by researchers are generally classified into 3 categories, according to their structures: flexible linkers, rigid linkers, and in vivo cleavable linkers, which are used, for example, for delivering prodrugs that are activated by cleavage of the linker in situ.

[0750] Besides the role in linking the functional domains together (as in flexible and rigid linkers) or releasing the free functional domain in vivo (as in in vivo cleavable linkers), linkers also can improve properties of the linked moieties. These include, for example, improving biological activity, increasing expression yield, and achieving desirable pharmacokinetic profiles. Databases and methods for selecting linkers are known to those of skill in the art (see, e.g., George et al. (2002) “An analysis of protein domain linkers: their classification and role in protein folding,” Protein Eng. 15:871-879).

a) Flexible linkers

[0751] Flexible linkers are usually applied when the joined domains require a certain degree of movement or interaction. Flexible linkers are generally rich in small or polar amino acids such as Gly and Ser to provide good flexibility and solubility. They are suitable choices when certain movements or interactions (e.g., in an scFv) are required for fusion protein domains. In addition, although flexible linkers do not have rigid structures, they can serve as a passive linker to keep a distance between functional domains. The length of the flexible linkers can be adjusted to allow for proper folding or to achieve optimal biological activity of the fusion proteins.

[0752] Flexible linkers generally are composed of small, non-polar (e.g., Gly) or polar (e.g., Ser or Thr) amino acids as suggested by Argos (1990) J. Mol. Biol. 211(4):943-958. The small size of these amino acids provides flexibility, and allows for mobility of the connecting functional domains. The incorporation of Ser or Thr can maintain the stability of the linker in aqueous solutions by forming hydrogen bonds with the water molecules, and therefore reduces the unfavorable interaction between the linker and the protein moieties.

[0753] Exemplary flexible linkers are linkers that contain primarily or only stretches of Gly and Ser residues (“GS” linkers). An example is a flexible linker that has the sequence of (Gly-Gly-Gly-Gly-Ser)ₙ. By adjusting the copy number “n”, the length of this GS linker can be selected or chosen to achieve appropriate separation of the functional domains, or to maintain necessary inter-domain interactions. Flexible linkers are also rich in small or polar amino acids such as Gly and Ser, and also can contain additional amino acids, such as Thr and Ala, to maintain flexibility, as well as polar amino acids, such as Lys and Glu, to improve solubility.

[0754] To confer protease resistance and to increase the flexibility of the fusion protein, the SCDKTH hinge sequence and other hinge sequences can be replaced with, or preceded by, a short polypeptide linker. Exemplary of polypeptide linkers are (Gly-Ser)ₙ amino acid sequences (GS linkers), with some Glu or Lys residues dispersed throughout to increase solubility. For example, polypeptide linkers include, but are not limited to, (GlySer)ₙ, where n=1-10; (GlySer₂); (Gly₄Ser)ₙ, where n=1-10; (Gly₃Ser)ₙ, where n=1-5; (SerGly₄)ₙ, where n=1-5; (GlySerSerGly)ₙ, where n=1-5; GSGGSSGG; GSSSGSGSGSSG; GSSSGSGSGSSGG; GGSSGG; GGSSGGSGGSSSG; GSSSGSGSGGSSSGSGSG; GGSSGGSSGGGSSGGSSG; and GSSSGS (see SEQ ID NOs: 816-827 for the GS linkers). The linker can be a poly-Gly peptide that is at least 2-18 residues in length, or longer, or a similar linker of the same length and flexibility. Exemplary polypeptide linkers in the molecules provided herein, include, but are not limited to (see SEQ ID NOs: 816-827 for Gly-Ser linkers): GSGS, GGGGS, or GGGGSGGGGSGGGGS, for example. Another linker that provides similar performance is a (GGGGS)₄ (SEQ ID NO:819) linker. Another Gly and Ser rich flexible linker is GSAGSAAGSGEF (SEQ ID NO:828). This linker has been shown to maintain good solubility in aqueous solutions. Linkers that contain only glycine can be used. For example (Gly)₆ (SEQ ID NO:1473) and (Gly)₈ (SEQ ID NO: 1474) linkers are known and shown to be stable against proteolytic enzymes digestion during protein purification from the expression organism.

[0755] Several other types of flexible linkers, including KESGSVSSEQLAQFRSLD (SEQ ID NO:829), and EGKSSGSGSESKST (SEQ ID NO:830). The Gly and Ser residues in the linker provide flexibility, and the Glu and Lys improve the solubility.

b) Rigid linkers

[0756] While flexible linkers have the advantage of connecting functional domains passively and permitting certain degree of movements, the lack of rigidity of these linkers can be limiting. Rigid linkers are chosen when the spatial separation of the domains is needed to preserve the stability or bioactivity of the fusion proteins. Rigid linkers exhibit relatively stiff structures by adopting a-helical structures or by containing multiple Pro residues. The length of the linkers can be easily adjusted by changing the copy number to achieve an optimal distance between domains.

[0757] Alpha helix-forming linkers with the sequence of (EAAAK)ₙ (SEQ ID NO:831) have been applied to the construction of many recombinant fusion proteins. An α-helical structure is rigid and stable, with intra-segment hydrogen bonds and a closely packed backbone. The stiff α-helical linkers can act as rigid spacers between protein domains. An example of a rigid linker is: A(EAAAK)ₙA (SEQ ID NO:832), wherein n=2-5. This linker displays an α-helical conformation, which was stabilized by the Glu-Lys⁺ salt bridges within segments. Another type of rigid linker has a Pro-rich sequence, (XP)ₙ, where X designates any amino acid, and is generally Ala, Lys, or Glu. The presence of Pro in non-helical linkers increases stiffness, and allows for effective separation of the protein domains. Examples of such linkers are 33-residue peptides containing repeating -Glu-Pro- and -Lys-Pro-.

[0758] Those of skill in the art can select from known linkers or design linkers. Desirable properties and requisites therefor are known. The following discussion summarizes some exemplary linkers (see, Chen et al. (2013) Adv. Drug. Deliv. Rev. 65:1357-1369), which provides details of flexible and rigid and cleavable linkers and that can be used). Flexible linkers are rich in small and/or hydrophilic amino acids such as Gly or Ser to provide the structural flexibility and have been used to connect functional domains that favor interdomain interactions or movements. Rigid linkers may be used where sufficient separation of protein domains is needed. Rigid linkers are designed or selected to be those that adopt α-helical structures or incorporate proline. Rigid linkers can keep protein moieties at a distance. Flexible and rigid linkers are stable in vivo, and do not allow the separation of joined proteins. Cleavable linkers permit the release of free functional domain in vivo via reduction or proteolytic cleavage. They generally are used for delivery of a prodrug to a target site.

[0759] An additional linker, such as between the TNFR1 antagonist, and the activity-modifying portion, such as the Fc portion, can be included; such linkers can contain, for example, all or a portion of the hinge sequence, sufficient to provide flexibility, of trastuzumab, including at least the residues SCDKTH (corresponding to residues 222-227 of SEQ ID NO:26), or all or a portion, containing a sufficient portion to provide flexibility, of the hinge region of nivolumab, with the sequence ESKYGPPCPPCP (corresponding to residues 212-223 of SEQ ID NO:29) or a sequence having at least 98% or 99% sequence identity thereto, or any other suitable antibody hinge region or sequence known in the art.

[0760] An Fc subunit, which is or is not a fusion protein, can be included (and can be modified to contain knobs-in-holes (see discussion below). It will assemble within the mammalian cell expression system to form a knobs-in-hole mediated Fc dimer to create an Fc dimer, which further increases the serum half-life and stability of the molecule. In certain embodiments, the second Fc subunit is fused with a TNFR1 antagonist creating a bivalent antibody-like structure. In other embodiments, only one Fc subunit is included (an Fc monomer).

ii. Chemical Linkers

[0761] In some embodiments, the linker is a chemical linker. These include linkers that are non-cleavable moieties, chemical cross-linking reagents, and polypeptide modifying agents, such as polymeric molecules, including PEGylation moieties. Chemical linkers are more amenable to creation of branched constructs and other structures that cannot be achieved with peptide linkers.

[0762] Exemplary linkers include non-cleavable linkers. Non-cleavable linkers include, for example, amide linkers and amide and ester linkages with succinate spacers (see, e.g., Dosio et al., (2010) Toxins 3:848-883). Exemplary chemical cross-linking linkers include, but are not limited to, SMCC (Succinimidyl-4-(N-maleimidomethyl)cyclohexane-1-carboxylate) and SIAB (Succinimidyl (4-iodoacetyl)aminobenzoate). SMCC is an amine-to-sulfhydryl crosslinker that contains NHS-ester and maleimide reactive groups at opposite ends of a medium-length cyclohexane-stabilized spacer arm. SIAB is a short, NHS-ester and iodoacetyl crosslinker for amine-to-sulfhydryl conjugation. Other exemplary cross-linking reagents include, but are not limited to, thioether linkers, chemically labile hydrazone linkers, 4-mercaptovaleric acid, BMPEO, BMPS, EMCS, GMBS, HBVS, LC-SMCC, MBS, MPBH, SBAP, SIA, SMPB, SMPH, sulfo-EMCS, sulfo-GMBS, sulfo-KMUS, sulfo-MBS, sulfo-SIAB, sulfo-SMCC, and sulfo-SMPB, and SVSB (succinimidyl-(4-vinylsulfonyl)benzoate), and bis-maleimide reagents, such as DTME, BMB, BMDB, BMH, BMOE, BM(PEO)₃, and BM(PEO)₄, which are commercially available (Pierce Biotechnology, Inc.). Bis-maleimide reagents allow the attachment of a free thiol group of a cysteine residue of an antibody to a thiol-containing targeted agent, or linker intermediate, in a sequential or concurrent fashion. Other thiol-reactive functional groups, besides maleimide, include iodoacetamide, bromoacetamide, vinyl pyridine, disulfide, pyridyl disulfide, isocyanate, and isothiocyanate. Other exemplary linkers and methods of use are well known to those of skill in the art, for example, the linkers and methods described in U.S. Patent Publication No. 2005/0276812, and in Ducry et al. (2010) Bioconjug. Chem. 21:5-13.

[0763] Linkers optionally can be substituted with groups that modulate properties, such as solubility and reactivity. For example, a sulfonate substituent can increase water solubility of the reagent and facilitate the coupling reaction of the linker reagent with an antibody or drug moiety, and/or facilitate coupling reactions. Linker reagents can also be obtained via commercial sources, such as Molecular Biosciences Inc. (Boulder, CO.), or synthesized in accordance with procedures described in Toki et al. (2002) J. Org. Chem. 67:1866-1872; U.S. Pat. No. 6,214,345; U.S. Publication Nos. 2003/130189, and 2003/096743; and International Application Publication Nos. WO 02/088172, WO 03/026577, WO 03/043583, and WO 04/032828. For example, linker reagents such as DOTA-maleimide (4-maleimidobutyramidobenzyl-DOTA) can be prepared by the reaction of aminobenzyl-DOTA with 4-maleimidobutyric acid (Fluka) activated with isopropylchloroformate (Aldrich), following the procedure of Axworthy et al. (2000) Proc. Natl. Acad. Sci. U.S.A. 97(4):1802-1807. DOTA-maleimide reagents react with the free cysteine amino acids of the cysteine engineered antibodies and provide a metal complexing ligand on the antibody (Lewis et al. (1998) Bioconj. Chem. 9:72-86). Chelating linker labelling reagents, such as DOTA-NHS (1,4,7,10-tetraazacyclododecane-1,4,7,10-tetraacetic acid mono (N-hydroxysuccinimide ester)), are commercially available (Macrocyclics, Dallas, TX.).

[0764] The linker can be a dendritic type linker for covalent attachment of more than one moiety through a branching, multifunctional linker moiety to an antibody (see, e.g., Sun et al. (2002) Bioorganic & Medicinal Chemistry Letters 12:2213-2215; Sun et al. (2003) Bioorganic & Medicinal Chemistry 11:1761-1768; King et al. (2002) Tetrahedron Letters 43:1987-1990). If an antibody bears only one reactive cysteine thiol group, a multitude of other moieties can be attached through a dendritic linker. Exemplary dendritic linker reagents are known (see, e.g., U.S. Patent Publication No. 2005/0276812).

[0765] Another example of a chemical linker (also can be an activity modifier for use in constructs herein) are PEG molecules, and branched PEG molecules, particularly those with a molecular weight of 30 kDa or more. A PEG linker provides for the introduction of multispecificity and bivalency (in the case of TNFR2 agonists where receptor clustering enhances signaling), and increases the molecular weight of the molecule, which increases in vivo serum half-life. PEG linkers also ameliorate difficulties in the re-engineering of antibodies, for example, by avoiding the introduction of non-natural structures that are degraded and cleared rapidly and/or cause immunogenicity.

c. Fc—Activity Modifiers

[0766] Among the components of constructs are portions or regions that modulate or alter the activity and/or pharmacological properties of the constructs (see formula 1 and 2 above). Exemplary of such are Fc regions, modified Fc regions, other multimerization domains, dimers of the Fc and modified Fc, can increase serum half-life. Activity modifiers can confer properties, such as, but not limited to, extending plasma half-life by decreasing access to proteases, decreasing renal filtration, and/or by altering the intracellular routing via receptor-mediated recycling; providing for absorption across epithelial bilayers by binding to receptors that undergo transcytosis; targeting in vivo sites that over-express or uniquely express specific receptors or antigens; and other properties, as exemplified in the discussion below, and also as known in the art.

[0767] As provided herein, the constructs can include, as an activity modifier, the Fc region of a human immunoglobulin, such as an IgG, for example, an IgG1 Fc (SEQ ID NO:10), an IgG2 Fc (SEQ ID NO:12), an IgG3 Fc (SEQ ID NO:14), or an IgG4 Fc (SEQ ID NO:16). In particular, the Fc is derived from an IgG1 or IgG4 antibody. For example, the linker can include an IgG1 kappa Fc region, such as the IgG1 Fc derived from trastuzumab, containing the C_{H}2 and C_{H}3 domains of the trastuzumab heavy chain (see, e.g., residues 234-450 of SEQ ID NO:26; see, also, SEQ ID NO:27). The Fe subunit in the bi-specific molecules provided herein also can be an IgG4 Fc, such as, for example, the IgG4 Fc derived from nivolumab (Opdivo®), containing the CH2 and C_{H}3 domains of the nivolumab heavy chain (see, e.g., residues 224-440 of SEQ ID NO:29; see, also, SEQ ID NO:30).

[0768] The Fc region can be mutated or modified, as discussed below, to eliminate, reduce, or enhance, immune effector functions, including, for example, any one or more of antibody-dependent cellular cytotoxicity (ADCC; also known as antibody-dependent cell-mediated cytotoxicity), antibody-dependent cell-mediated phagocytosis (ADCP), and complement-dependent cytotoxicity (CDC). In some embodiments herein, for example, where the construct is a bi-specific molecule is used to treat inflammatory and autoimmune diseases and conditions, immune effector functions are eliminated or reduced. Where the therapeutic is used in the treatment of a tumor or cancer, immune effector functions can be enhanced to improve the anti-tumor immune response and therapeutic efficacy. Additionally, or alternatively, the Fc region is modified to enhance FcRn recycling, to increase the in vivo serum stability and half-life of the molecules provided herein.

[0769] For purposes here, the Fc regions or domains are modified, particularly to decrease or eliminate ADCC. Small molecule therapeutics, such as antibody fragments (e.g., Fabs, scFvs, dAbs), are advantageous. They can be produced in high yields, and have other advantageous properties. They exhibit enhanced tissue penetration and target accessibility compared to monoclonal antibodies (mAbs), and they can prevent undesirable effects of mAbs, such as, for example, receptor clustering, the activation of immune effector functions, poor tissue penetration and lack of access to targets in poorly vascularized areas. Small antibody fragments, however, have poor pharmacokinetic properties. For example, due to their small size, dAbs and other antibody fragments are rapidly cleared by the kidneys, as molecules that are 50-60 kDa in size or smaller are subject to renal filtration. The rapid clearance and short elimination half-life of small antibody fragments, which can be less than a few hours, decreases the in vivo efficacy and necessitates frequent administration and/or continuous infusion.

[0770] Several methods can be used to increase the retention and in vivo half-life of small antibody fragments, such as dAbs. For example, as provided herein, the dAb(s) in the TNFR1 antagonist, TNFR2 agonist and combination/multi-specific constructs is/are fused to a linker that is or includes a half-life extender, such as, for example, the Fc region of an IgG, such as IgG1 or IgG4. The Fc can be a monomer or a dimer.

[0771] Fusion of small antibody fragments, such as dAbs, to the Fc region of an IgG molecule increases the size of the molecule, thereby protecting it from being cleared/excreted from the body, and mediates binding to the neonatal Fc receptor (FcRn) expressed on endothelial cells, which protects antibodies from lysosomal degradation and prolongs the in vivo half-life of the antibody. The addition of an Fc, however, can introduce unwanted properties, such as the induction of immune effector functions that can result in complement activation, the release of proinflammatory cytokines and cytotoxicity. Because TNFR1 is almost universally expressed, and TNFR2 is expressed by many tissues, it generally is not desirable to use ADCC-enhanced antibodies, but rather rely on the antagonist activity of the antibody for efficacy.

[0772] As described herein, the Fc region in the TNFR1 antagonist is modified to improve pharmacokinetic and pharmacodynamic (i.e., pharmacological) properties, and to eliminate undesirable properties. For example, the Fc region is modified to take advantage of/enhance neonatal FcR recycling to increase the in vivo half-life, and/or is mutated to eliminate Fc-related immune effector functions, such as antibody-dependent cellular cytotoxicity (ADCC; also known as antibody-dependent cell-mediated cytotoxicity), antibody-dependent cell-mediated phagocytosis (ADCP), and complement-dependent cytotoxicity (CDC). Additionally, in embodiments where the construct is multi-specific, such as bispecific, such as embodiments in which it contains an TNFR1 antagonist and an TNFR2 agonist, and contains an Fc dimer, the dimer is mutated to introduce knobs-in-holes to prevent homodimerization. Numerous modifications to Fc portions (or regions) are known to those of skill in the art (see, e.g., Li et al., (2014) Expert Opin Ther Targets 18:335-350).

i. Modifications to the Fc Portions

### a) Knobs-in-Holes

[0773] Bispecific antibodies (bsAbs) include two distinct antigen-binding sites, allowing for an alternative therapeutic approach to conventional therapeutic monoclonal antibodies (mAbs), whereby, limitations associated with mAbs, such as receptor co-clustering, can be avoided. While small antibody fragments are easier and less expensive to produce in high yields, and can easily penetrate tissues, they are associated with limitations, such as poor stability, solubility, and pharmacokinetic properties. For example, their small size results in shorter serum half-lives, reduced tissue retention and rapid clearance from the blood through the kidneys. As a result, IgG-like bi-specific (bs) Abs, which do not have the same limitations, are advantageous. For example, bsAbs can include an Fc region to increase the serum half-life, and also, to permit effector functions where desirable. The production of high yields of purified bsAbs, however, can be challenging, as homodimerization of the heavy chains must be prevented. The “knobs-in-holes” (KiH; also known as “knobs-into-holes”) approach provides a solution to this problem. The C_{H}3 domains of antibody (IgG) heavy chains are engineered for heterodimerization, to allow for the construction of Fc-containing bi-functional therapeutic molecules that will not self-associate.

[0774] The knobs-in-holes approach involves asymmetrically mutating interfacial residues in the CH3 domains of the two parental heavy chains in a complementary manner. “Knobs” are created by replacing amino acids with small side chains with amino acids with larger side chains, such as tyrosine or tryptophan, at the interface between CH3 domains, and “holes” are created by replacing amino acids with large side chains with amino acids with smaller ones, such as alanine or threonine. The knob and hole variants heterodimerize by virtue of the knob inserting into a correspondingly designed hole on the partner C_{H}3 domain. Knob-knob association is prevented due to steric repulsion, and hole-hole homodimers are destabilized. The knob mutation, for example, can be S354C, T366Y, T366W, or T394W, and the hole mutation can be Y349C, T366S, L368A, F405A, Y407T, Y407A, or Y407V (all by EU numbering). It has been shown that knobs created towards the center of the dimer interface, such as at residue T366, are more disruptive to homodimer formation than those located near the edge of the dimer interface. Residue T366 on the first CH3 domain is within hydrogen-bonding distance of residue Y407 on the second or partner C_{H}3 domain, thus, T366Y and Y407T represent a common knob-in-hole pair; this pair has been shown to generate heterodimers in yields of over 90% (see, e.g., Ridgway et al. (1996) Protein Eng. 9(7):617-621).

[0775] The IgG Fc regions, for example, in the bispecific TNFR1 antagonist/TNFR2 agonist constructs provided herein can be modified using the knobs-in-holes approach to generate heterodimerized molecules in high yields. Table 6, below, shows the corresponding knob and hole mutations by Kabat numbering and sequential numbering, with reference to the sequence of the IgG1 heavy chain constant domain set forth in SEQ ID NO:9. Any mutations known to those of skill in the art that introduce knobs-in-holes can be employed in constructs herein.

TABLE 6
IgG1 Fc Modifications that Introduce Knobs-into-Holes

| | | | Modifications by |
|---|---|---|---|
| | Modifications | Modifications | Sequential |
| Modification | by EU | by Kabat | Numbering |
| Type | Numbering | Numbering | (SEQ ID NO: 9) |
| Knob | S354C | S375C | S237C |
| Knob | T366Y | T389Y | T249Y |
| Knob | T366W | T389W | T249W |
| Knob | T394W | T422W | T277W |
| Hole | Y349C | Y370C | Y232C |
| Hole | T366S | T389S | T249S |
| Hole | L368A | L391A | L251A |
| Hole | F405A | F436A | F288A |
| Hole | Y407T | Y438T | Y290T |
| Hole | Y407A | Y438A | Y290A |
| Hole | Y407V | Y438V | Y290V |

b) Modifications that Enhance Neonatal Fc

### Receptor (FcRn) Recycling

[0776] There are numerous approaches to increasing the short serum half-life of small polypeptide or protein therapeutics. PEGylation, which is increases the serum half-life of small protein therapeutics, has a disadvantage. PEGylation can decrease potency or activity of a protein therapeutic, can result in heterogeneity, and can result immunoreactivity of the protein. Other approaches involve fusion to albumin, which can improve protein circulation by increasing the molecular weight and reducing renal clearance.

[0777] Serum half-life also can be increased by fusion to Fc portion of IgGs. The long circulating half-life of approximately 2-3 weeks, and slow clearance rate, of IgGs results at least in part, from their interaction with the neonatal Fc receptor (FcRn), which binds IgGs with high affinity at acidic pH, and releases them at neutral or higher pH. FcRn binds to the Fc portion (within the C_{H}2-C_{H}3 domains) of pinocytosed IgGs in the acidic (~pH 6) endosome in a 2:1 FcRn:IgG configuration (bivalent interaction), traffics them away from the lysosomal degradation pathway and to the cell surface, and recycles them back into circulation after exposure to the extracellular physiological pH (~7.4), at which the Fc-FcRn complex dissociates. Poor binding to FcRn at acidic pH results in trafficking of an antibody to the lysosome where it is degraded. Recycling receptors, such as FcRn, also provide a route for the transport of IgGs across the epithelium (transcytosis) and into the blood stream. Leveraging the interaction with FcRn can improve protein transport across epithelial barriers, such as in the gut and the lungs, allowing for noninvasive administration. Residues in the Fc CH2 and CH3 domains are involved in FcRn binding, and their mutation in mAbs has been shown to affect the in vivo serum half-life. The circulation and delivery of small protein therapeutics can be improved by fusing them to the Fc domain of IgG, such that the resulting fusion proteins bind to FcRn and take advantage of the IgG serum stabilization pathway. Fusion with an Fc domain also increases the molecular weight of the therapeutic, reducing renal clearance, but can be undesirable due to the potentially reduced tissue penetration and specific activity of the fusion protein. Alternatively, studies have shown that short FcRn-binding peptides (FcRnBPs) allow for the interaction of small proteins with FcRn, obviating the need for fusion to a high molecular weight Fc domain. For example, fusion with an FcRnBP increases the molecular weight by approximately 3 kDa, in comparison to fusions with Fc or albumin, which increase the molecular weight by approximately 50-70 kDa (see, e.g., Datta-Mannan et al. (2019) Biotechnol. J. 14:1800007; Sockolosky et al. (2012) Proc. Natl. Acad. Sci. USA 109(40):16095-16100).

[0778] For example, short (16 residue) linear and cyclic FcRnBPs (see, e.g., SEQ ID NOs: 48-51) have been fused to the C-terminus, N-terminus, or both, of Fab heavy and light chains (FcRnBP-Fab constructs), with 1-4 FcRnBPs per Fab. Studies of the pharmacokinetics in cynomolgus monkeys have shown that the FcRn binding of FcRnBP-Fab constructs increases as the number of peptides fused to the Fab increases. This results from increased avidity, with constructs containing four linear FcRnBPs fused to the N- and C-termini of the heavy and light chains of the Fab showing the greatest improvement in pharmacokinetics in cynomolgus monkeys relative to the parental Fab. For example, the half-life improved from 3.7 hours for the parental Fab, to between 15-60 hours for the various FcRnBP-Fab constructs (see, e.g., Datta-Mannan et al. (2019) Biotechnol. J. 14:1800007). While these results indicate an improvement in serum half-life, it is still much lower than the half-life for an IgG, which is about 2-3 weeks. The use of FcRnBPs also does not reduce renal clearance, as they do not significantly increase the molecular weight of the therapeutics.

[0779] As discussed above, fusion with an IgG Fe increases the half-life of small protein therapeutics by taking advantage of FcRn binding, and also by increasing the molecular weight of the therapeutic, such that it is less rapidly cleared from the body, for example, by the kidneys. To improve the pharmacokinetics and overall pharmacology, residues within the Fc region can be mutated to increase the affinity for FcRn, generally by greater than 30-fold, further increasing the in vivo half-life. The Fc region spanning the interface of the CH2 and C_{H}3 domains interacts with FcRn. Human Fc residues identified to play a role in FcRn binding include, for example, L251, M252, 1253, S254, L309, H310, Q311, L314, E380, N434, H435 and Y436 (by EU numbering, see Table 1). Mutations in residues located at the Fc-FcRn interface, including M252, S254, T256, H433, N434 and Y436 (by EU numbering), improve the stability of the human FcRn-IgG1 complex. For example, the replacements M252Y/S254T/T256E and H433K/N434F/Y436H result in an 11-fold and 6.5-fold improvement in binding to human FcRn at pH 6.0 relative to the wild-type IgG1, respectively, with efficient release at pH 7.4. The combination of these replacements results in a 57-fold increase in binding affinity to FcRn. Additional mutations in IgG1 Fc that showed an improvement in binding to FcRn include, for example, M252W, M252Y, M252Y/T256Q, M252F/T256D, E380A, and N434F/Y436H (see, e.g., Dall'Acqua et al. (2002) J. Immunol. 169:5171-5180).

[0780] The triple substitution M252Y/S254T/T256E, when introduced into the CH2 domain of MEDI-524, a humanized anti-respiratory syncytial virus (RSV) mAb, increased the serum half-life of the mAb approximately 4-fold in cynomolgus monkeys when compared to unmodified MEDI-524. When introduced into the Fc portion of MEDI-522, a humanized, affinity-optimized mAb directed against the human aᵥθ₃ integrin complex, the replacements M252Y/S254T/T256E (YTE) reduced its ADCC activity and its binding to human FcγRIIIA (F158 allotype). The ADCC activity of MEDI-522-YTE can be restored, and increased in comparison to unmodified MEDI-522, by introduction of the ADCC-enhancing replacements S239D/A330L/I332E (by EU numbering), indicating that the replacements YTE provide a reversible mechanism to modulate the ADCC function of a human IgG1 (see, e.g., Dall'Acqua et al. (2006) J. Biol. Chem. 281(33):23514-23524).

[0781] Residues at positions 250, 314 and 428 (by EU numbering) of the human IgG heavy chain, which are conserved among all four human IgG subtypes, also are located near the Fc-FcRn interface. The mutations T250Q, M428L and T250Q/M428L, when introduced into the Fe of a human IgG2 mAb, resulted in an increase in binding to FcRn at pH 6.0 of ~3-, 7- and 28-fold, respectively, with no binding observed at pH 7.5. When the pharmacokinetics of the mutants were evaluated in rhesus monkeys, it was found that the mean clearance, i.e., the volume of serum antibody cleared per unit of time, was ~-1.8-fold lower for the M428L mutant, and ~2.8-fold lower for the T250Q/M428L mutant, while the elimination half-life was ~1.8-fold longer for the M428L mutant and -1.9-fold longer for the T250Q/M428L mutant, compared to unmodified antibody. Since these residues are conserved among IgG subtypes, the mutations M428L and T250Q/M428L are expected to have similar effects in human IgG1, IgG3 and IgG4 antibodies (see, e.g., Hinton et al. (2004) J. Biol. Chem. 279(8):6213-6216). The modifications T250R/M428L were shown to result in selective binding to FcRn at pH 6.0, and a 2.8-fold decreased degradation of serum IgG2 and IgG1 in rhesus monkeys (see, e.g., Saxena et al. (2016) Front. Immunol. 7:580).

[0782] The mutation N434A (by EU numbering), when introduced into the human anti-HER2 IgG1 trastuzumab, resulted in ~4-fold higher affinity towards human FcRn over unmodified antibody at pH 6, but negligible binding at pH 7.4. The N434A variant had increased exposure, decreased clearance (~2-fold) and increased half-life (~2-fold) compared to the wild-type antibody when tested in vivo in cynomolgus monkeys. In contrast, the mutation N434W, which resulted in ~80-fold increased binding to FcRn at pH 6, exhibited a clearance rate similar to wild-type; this mutant also exhibited significant binding to FcRn at pH 7.4, indicating that maintaining pH-dependent binding of Fc mutants to FcRn is critical for improving the in vivo pharmacokinetics (Yeung et al. (2009) J. Immunol. 182:7663-7671). The N434A mutation also counters the poor FcRn affinity that can result from the introduction of mutations that increase binding to FcγRs; N434A is typically added to the mutations S298A/E333A/K333A to create a variant with enhanced FcγR binding and normal or improved FcRn binding. Fc mutations that improve FcRn binding also include N434Y, E294del/T307P/N434Y and T256N/A378V/S383N/N434Y. The E294 deletion results in higher sialylation of the N297 glycan on the Fc, which increases antibody half-life in vivo. Indicating that sialylation also plays a role in regulating serum half-life (see, e.g., Saunders, K. O. (2019) Front. Immunol. 10:1296).

[0783] The replacements M428L/N434S (by EU numbering), when introduced into the humanized anti-VEGF IgG1 antibody bevacizumab (Avastin®), resulted in an 11-fold increase in affinity to FcRn at pH 6.0, and extended the in vivo serum half-life in cynomolgus monkeys from 9.7 days to 31.1 days, representing a 3.2-fold improvement. The M428L/N434S modification resulted in similar increases in FcRn binding and half-life extension when introduced into the anti-EGFR antibody cetuximab, which is rapidly cleared due to receptor-mediated internalization. The half-life extension of these anti-tumor antibodies correlated with enhanced tumor reduction in vivo in a mouse model, indicating that the in vivo therapeutic efficacy of the antibodies is increased when the pharmacokinetics, such as clearance rate, are improved. Other mutations engineered into the bevacizumab Fc include (by EU numbering): N434S, with ~3-fold improvement in FcRn binding and ~2.8 fold increase in serum half-life in mice; V259I/V308F, with ~6-fold improvement in FcRn binding, and ~3-fold and ~2-fold increases in serum half-life in mice and cynomolgus monkeys, respectively; M252Y/S254T/T256E, with ~7-fold improvement in FcRn binding, and ~4-fold and 2.5-fold increases in serum half-life in mice and cynomolgus monkeys, respectively; and V259I/V308F/M428L, with ~20-fold improvement in FcRn binding, and ~4-5-fold and 2.6-fold increases in serum half-life in mice and cynomolgus monkeys, respectively (Zalevsky et al. (2010) Nat. Biotechnol. 28(2):157-159).

[0784] The above-identified mutations, and other such mutations, can be introduced into the IgG Fc region in constructs provided herein. These include constructs, such as those of Formulae 1 and 2, in which the linker includes an Fc or an Fc dimer, depending upon the structure of the construct.

[0785] In some embodiments, the IgG Fc regions in constructs herein, such bispecific TNFR1 antagonist/TNFR2 agonist constructs, and the TNFR1 antagonist constructs provided herein are modified to enhance neonatal FcR recycling to increase in vivo half-life. This can be effected by mutating residues at the interface of the CH2 and CH3 domains of IgG Fc, which are responsible for binding to FcRn. These include, but are not limited to, the residues T250, L251, M252, 1253, S254, T256, V259, T307, V308, L309, H310, L314, Q311, A378, E380, S383, M428, H433, N434, H435 and Y436, by EU numbering. Exemplary Fc modifications that increase binding to FcRn include, but are not limited to, one or more of T250Q, T250R, M252F, M252W, M252Y, S254T, T256D, T256E, T256Q, V259I, V308F, E380A, M428L, H433K, N434F, N434A, N434W, N434S, N434Y, Y436H, M252Y/T256Q, M252F/T256D, M252Y/S254T/T256E, H433K/N434F/Y436H, N434F/Y436H, T250Q/M428L, T250R/M428L, M428L/N434S, V259F1V308F, V259I/V308F/M428L, E294del/T307P/N434Y, T256N/A378V/S383N/N434Y, and combinations thereof, by EU numbering. Table 7, below, shows the corresponding mutations by Kabat numbering and sequential numbering, with reference to the sequence ofthe IgG1 heavy chain constant domain set forth in SEQ ID NO:9. Other modifications, known in the art to confer enhanced or increased FcRn binding also are contemplated for use herein.

TABLE 7
IgG1 Fc Modifications that Enhance FcRn Binding

| | Modifications | Modifications by |
|---|---|---|
| Modifications by EU | by Kabat | Sequential Numbering |
| Numbering | Numbering | (SEQ ID NO: 9) |
| T250Q | T263Q | T133Q |
| T250R | T263R | T133R |
| M252F | M265F | M135F |
| M252W | M265W | M135W |
| M252Y | M265Y | M135Y |
| S254T | S267T | S137T |
| T256D | T269D | T139D |
| T256E | T269E | T139E |
| T256Q | T269Q | T139Q |
| V259I | V272I | V142I |
| V308F | V327F | V191F |
| E380A | E405A | E263A |
| M428L | M459L | M311L |
| H433K | H464K | H316K |
| N434F | N465F | N317F |
| N434A | N465A | N317A |
| N434W | N465W | N317W |
| N434S | N465S | N317S |
| N434Y | N465Y | N317Y |
| Y436H | Y467H | Y319H |
| M252Y/T256Q | M265Y/T269Q | M135Y/ T139Q |
| M252F/T256D | M265F/T269D | M135F/T139D |
| M252Y/S254T/ | M265Y/S267T/ | M135Y/S137T/ |
| T256E | T269E | T139E |
| H433K/N434F/ | H464K/N465F/ | H316K/N317F/ |
| Y436H | Y467H | Y319H |
| N434F/Y436H | N465F/Y467H | N317F/Y319H |
| T250Q/M428L | T263Q/M459L | T133Q/M311L |
| T250R/M428L | T263R/M459L | T133R/M311L |
| M428L/N434S | M459L/N465S | M311L/N317S |
| V259I/V308F | V272I/V327F | V142I/ V191F |
| V259I/V308F/M428L | V272I/V327F/M459L | V142I/V191F/M311L |
| E294del/T307P/ | E311del/T326P/ | E177del/T190P/ |
| N434Y | N465Y | N317Y |
| T256N/A378V/ | T269N/A401V/ | T139N/A261V/ |
| S383N/N434Y | S408N/N465Y | S266N/N317Y |

### c) Enhancement of or Reduction/Elimination of Fc Immune Effector Functions

[0786] There are four human IgG subclasses that differ in effector functions, circulating half-life and stability. IgG1 has Fc effector functions, is the most abundant IgG subclass, and is the most commonly used subclass in FDA-approved therapeutic proteins. IgG2 is deficient in Fc effector functions, but dimerizes with other IgG2 molecules, and is unstable due to scrambling of disulfide bonds in the hinge region. IgG3 has Fc effector functions, and a very long, rigid hinge region. IgG4 is deficient in Fc effector functions, has a shorter circulating half-life than the other subclasses, and the IgG4 dimer is biochemically unstable due to the presence of a single disulfide bond in the hinge region, which leads to the exchange of H chains between different IgG4 molecules. Thus, Fc regions from IgG2 and IgG4 do not possess effector functions, and can be used in instances where effector functions are not required or would be detrimental, for example, in the context of autoimmune and inflammatory diseases and disorders.

[0787] Most approved therapeutic mAbs belong to the human IgG1 subclass, and can interact with the humoral and cellular components of the immune system. For example, antibodies engage the humoral immune response via interaction with complement protein C1q, which initiates the complement cascade, resulting in the formation of the membrane attack complex which induces cytolysis in the target cell (i.e., complement-dependent cytotoxicity (CDC)), and engage the cellular immune response by interaction with Fc gamma receptors (FcγRs). The FcγRs include the FcγRI (CD64), FcγRII (CD32) and FcγRIII (CD16) classes that differ in their cell surface expression and Fc binding affinities. The five activating FcγRs include the high affinity FcγRI that can bind monovalent antibodies, and the lower affinity FcγRIIa, FcγRIIc, FcγRIIIa and FcγRIIIb, which require avidity-based interactions. FcγRIIb is the only inhibitory receptor. Upon binding of an Fc to an activating receptor, intracellular signaling pathways, modulated through the phosphorylation of immunoreceptor tyrosine-based activation motifs (ITAMs), result in effector functions, such as antibody-dependent cell-mediated cytotoxicity (ADCC; also called antibody-dependent cellular cytotoxicity) and antibody-dependent cell-mediated phagocytosis (ADCP; also called antibody-dependent cellular phagocytosis), as well as inflammation due to the induction of cytokine secretion. Signaling via the inhibitory FcγRIIb, which is modulated through the phosphorylation of immunoreceptor tyrosine-based inhibitory motifs (ITIMs), recruits phosphatases that counter-balance the activating signaling pathways (see, e.g., Wang et al. (2018) Protein Cell 9(1):63-73).

[0788] The hinge and proximal CH2 amino acid sequence (lower hinge-upper CH2 domain region), and glycosylation of the conserved N297 residue (by EU numbering) in the CH2 domain Asn-X-Ser/Thr glycosylation motif of the Fc region, mediate the interactions of antibodies with FcγRs and complement protein C1q. Antibody/Fc engineering has been used to modify the immune effector functions of antibodies by altering their binding to C1q and various Fcγ receptors. The CDC, ADCC and ADCP activities of therapeutic mAbs can thus be increased or decreased, depending on the application. For example, the efficacy of anti-cancer mAbs depends in part on their induction of FcγR effector functions. The effector function includes the activation of natural killer (NK) cells via FcγRIIIa and the subsequent ADCC activity and release of inflammatory cytokines, the induction of macrophage-mediated ADCP via interactions with multiple FcγRs, and the recruitment and activation of other immune cells, such as neutrophils, the primary receptor for NK cell-mediated ADCC. FcγRIIIa has two polymorphic variants: one with V158, which has a higher affinity for IgG1; and one with F158, with a lower affinity for IgG1. Cancer patients with the high affinity V158 polymorphism can have better outcomes following treatment with cetuximab, trastuzumab and rituximab, compared to patients with the low affinity F158 polymorphism. Results such as these highlight the role that FcγR-mediated immune effector functions play in therapies, and indicate that engineering antibodies and related molecules to have increased affinity to FcγRs can enhance the therapeutic efficacy (see, e.g., Wang et al. (2018) Protein Cell 9(1):63-73).

[0789] Residues in the lower hinge and proximal CH2 regions of IgGs have been determined to be critical for binding to FcγRs. Residues that are within 5 angstroms from the FcγR:Fc interface for FcγRI, FcγRIIa, FcγRIIb and FcγRIIIb, include the residues (by EU numbering) P232, E233, L234, L235, G236, G237, P238, S239 (corresponding to residues P115-S122, with reference to SEQ ID NO:9), D265, V266, S267, H268, E269, D270 (corresponding to residues D148-D153, with reference to SEQ ID NO:9), Y296, N297, S298, T299 (corresponding to residues Y179-T182, with reference to SEQ ID NO:9), and N325, K326, A327, L328, P329, A330, P331 and 1332 (corresponding to residues N208-I215, with reference to SEQ ID NO:9) (see, e.g., Wang et al. (2018) Protein Cell 9(1):63-73).

[0790] Modifications of Fe that enhance or decrease ADCC activity and/or enhance affinity/binding to receptors are known to those of skill in the art. For example, Fc modifications that increase the IgG1 affinity for and binding to FcγRIIIa, and/or enhance ADCC function, include the replacements (by EU numbering): F243L/R292P/Y300L/V305I/P396L, L235V/F243L/R292P/Y300L/P396L, F243L/R292P/Y300L, S239D, I332E, S239D/I332E, S239D/A330L/I332E, S298A/E333A/K334A, and the combinations of L234Y/L235Q/G236W/S239M/H268D/D270E/S298A in one heavy chain and D270E/K326D/A330M/K334E in the opposing heavy chain, and L234Y/G236W/S298A in one heavy chain and S239D/A330L/I332E in the opposing heavy chain. Additionally, the mutations A327Q/P329A (interact with FcγRI), D265A/S267A/H268A/D270A/K326A/S337A (interact with FcγRIIa), G236A (interacts with FcγRIIa), and T256A/K290A/S298A/E333A/K334A (interact with FcγRIIIa), result in high affinity interactions with FcγRs.

[0791] Fc modifications that increase binding to FcγRIIa and FcγRIIIa, and enhance ADCC and ADCP, include (by EU numbering) G236A/I332E, G236A/S239D/I332E (also increases binding to FcγRI), and G236A/S239D/A330L/I332E (see, e.g., Wang et al. (2018) Protein Cell 9(1):63-73; Saxena et al (2016) Front. Immunol. 7:580; and Saunders, K. O. (2019) Front. Immunol. 10:1296).

[0792] Glyco-engineering of IgGs, which contain a conserved N-linked glycosylation site at residue N297 in the CH2 domain, can enhance Fc effector function. Glycosylation of N297 is essential for maintaining Fc conformation and mediating its interactions with FcγRs (and C1q). The glycan present at residue N297 typically has two N-acetylglucosamine (GlcNAc), three mannose, and two more GlcNAc linked to the mannose, to form a biantennary complex glycan. Additional fucose, galactose, sialic acid and GlcNAc can be added to the core glycan structure. IgGs found circulating in human sera generally are fucosylated, but recombinant IgG production can alter the glycan composition by expressing the antibody in plant cells, knocking in or out specific glycosidases, or in vitro enzymatic digestion of the glycosylated IgG; because both heavy chains are glycosylated, a single IgG molecule can have glycan heterogeneity. The glycan directly affects FcγR binding. For example, the N297 glycan on the Fc can clash with glycans on the FcγRIII protein, resulting in poor engagement of effector cells that mediate ADCC. Fc regions containing different glycans at N297 adopt different hinge region conformations, which can affect the Fc's ability to interact with FcγRs. Expression of β(1,4)-N-acetylglucosaminyltransferase III when expressing IgG generates an antibody that is glycosylated at position N297 with a biantennary glycan; this antibody has increased binding to FcγRIIIa and enhanced ADCC activity. It has been demonstrated that fucose deficient (afucosylated/non-fucosylated) IgG1s exhibit up to 50-fold increased binding to FcγRIIIa and enhanced ADCC activity. Two glyco-engineered (afucosylated) mAbs, obinutuzumab (anti-CD20) and mogamulizumab (anti-CCR4) have been approved for clinical use, indicating the potential for glyco-engineering for enhanced effector function, and its translation into clinically approved therapeutics (see, e.g., Wang et al. (2018) Protein Cell 9(1):63-73; Saxena et al. (2016) Front. Immunol. 7:580; and Saunders, K. O. (2019) Front. Immunol. 10:1296).

[0793] The Fc also can be modified to bind with a wider range of Fc receptors. Fc receptors for isotypes other than gamma (i.e., IgA, IgM and IgE) exist on certain leukocytes, and by modifying an Fc region to engage with multiple Fc receptors, an antibody with expanded abilities to engage effector cells is created. Neutrophils, which are the most abundant leukocytes in the body, engage the Fc of IgA antibodies via the FcαRI receptor. For example, to engage FcγRs and FcαRI, single domains of IgA2 were added to the end of the IgG1 constant region, creating a four domain constant region, CH1g-CH2g-CH3g-CH3a. The C_{H}1 domain of IgG1 was replaced with the alpha 1 constant region domain, generating a constant region (CH1a-CH2g-CH3g-CH3a) that is closer in structure to the alpha constant region. These four-domain, cross-isotype IgGA chimeric antibodies bound to J chain similarly to natural IgA2, had reduced transport by polymeric Ig receptor, had a 3-5-fold decrease in FcγRI affinity, and the short serum half-life of IgA2 instead of the protracted serum circulation of IgG1. The four-domain, cross-isotype IgGA chimeric antibodies, however, had the ability to mediate complement-dependent lysis of sheep red blood cells and were more pH-resistant than IgG1. Another cross-isotype Fc was created by fusing the gamma 1 and alpha constant regions together to create a tandem G1-A Fc region, in which the hinge, C_{H}2 and C_{H}3 domains of IgA2 were fused to the C-terminus of IgG1. This tandem cross-isotype IgG/IgA fusion showed similar expression levels, antigen binding and thermostability as IgG1, and, in vitro, bound to FcαRI and FcγRI, FcγRII, FcγRIIIa and FcRn, with affinities similar to wild-type IgA and IgG, respectively. The binding to various FcRs resulted in ADCC activity with polymorphonuclear cells and NK cells; C1q binding, however, was reduced 3-fold compared to IgG1. The tandem IgG/IgA had an in vivo half-life similar to that of IgG1 in BALB/c mice. An alternative cross-isotype antibody was created by replacing the CH3 domain and C_{H}2 α1 loop residues 245-258 (by EU numbering, corresponding to the sequence PKPKDTLMISRTPE; (residues 128-141 of SEQ ID NO:9)) of the IgG1 constant region, with the structurally analogous regions of the IgA constant region. This chimeric Fc was able to bind FcγRI, FcγRIIa and FcαRI, and antibodies containing the chimeric Fc mediated ADCC with polymorphonuclear cells and ADCP with macrophages, and activated complement, but lacked binding to FcRn, which regulates antibody half-life; thus, further optimization is required for effective in vivo use (see, e.g., Saunders, K. O. (2019) Front. Immunol. 10:1296).

[0794] Another approach to enhance FcγR binding is the multimerization of IgG, which has shown promise in the treatment of autoimmune diseases. The IgG multimers are generated, for example, by adding heterologous multimerization domains such as isoleucine zippers, or by adding another hinge region at the N-terminus of the natural hinge, or by adding another hinge region at the C-terminus of the CH3 domain. IgG hexamers are created by appending the IgM tailpiece to the C-terminus of the IgG1 Fc and creating a cysteine bond at position 309; this multimeric IgG bound strongly to FcγRI, FcγRIIa and FcγRIIIa, and weakly to FcγRIIb and FcγRIIIb. The various multimeric IgGs have increased binding to FcγRI, FcγRIIb and FcγRIII, compared to monomeric IgG, and have shown promise in preclinical models of arthritis, neuropathy, and autoimmune myasthenia gravis. This multimeric IgG design is being further optimized to fine-tune which immune receptors, including FcRn, can bind to the multimer (see, e.g., Saunders, K. O. (2019) Front. Immunol. 10:1296).

[0795] Residues in the Fc region of IgG that are involved in the interaction with and binding to C1q (and hence, CDC) include (by EU numbering) S267, D270, K322, K326, P329, P331 and E333. Fc modifications that have been shown to enhance CDC by increasing C1q binding include, for example, K326A, E333A, K326A/E333A, K326W, K326W/E333S, K326M/E333S, C220D/D221C, H268F/S324T, S267E, H268F, S324T, S267E/H268F/S324T, and G236A/I332E/S267E/H268F/S324T (all by EU numbering). In the upper hinge region of the IgG1 Fc, substituting Trp, in various combinations, at positions 222, 223 and 224 (i.e., K222W, T223W, and H224W, by EU numbering), increased C1q binding and CDC activity relative to wild-type IgG1 without affecting FcγRIIIa binding and ADCC activity. Specifically, the mutations included K222W/T223W, K222W/T223W/H224W and D221W/K222W. The mutations C220D/D221C and C220D/D221C/K222W/T223W, also increased C1q binding and CDC activity (see, e.g., Wang et al. (2018) Protein Cell 9(1):63-73; Saxen et al. (2016) Front. Immunol. 7:580; Saunders, K. O. (2019) Front. Immunol. 10:1296; and Dall'Acqua et al. (2006) J. Immunol. 177:1129-1138).

[0796] IgG3 has the best in vitro binding to C1q; combining the C_{H}1 and hinge regions of IgG1 with the CH2 and CH3 regions of IgG3 (to retain ADCC activity from IgG1 and CDC activity from IgG3), creating IgG1/IgG3 cross-subtype antibodies, also increases C1q binding and enhances CDC activity. Another IgG1/IgG3 cross-subtype antibody with increased C1q binding and enhanced CDC activity includes the C_{H}1, hinge and CH3 of IgG1, and the CH2 of IgG3; these modifications allow for increased Cql binding since C1q binds the CH2 domain, as well as easy purification, since protein A binds the CH3 domain. Additionally, the modifications E345R/E430G/S440Y, which result in the formation of IgG hexamers with K322 oriented in a position to favorably interact with the hexameric C1q headpiece, enhanced CDC activity. The mutation E345R alone also results in IgG hexamer formation, with increased C1q binding and enhanced CDC activity (see, e.g., Wang et al. (2018) Protein Cell 9(1):63-73; Saxena et al. (2016) Front. Immunol. 7:580; Saunders, K. O. (2019) Front. Immunol. 10:1296).

[0797] Glycoengineering also can be used to improve complement binding; the N297 glycan within the CH2 domain of the Fc can be modified to improve CDC activity. For example, an overabundance of galactosylation in the IgG1 Fc increases C1q binding and CDC activity compared to the unmodified glycoform of IgG1, and also improves thermostability. Thus, galactosylating the Fc can be used to generate a stable biologic with enhanced CDC activity (see, e.g., Saunders (2019) Front. Immunol. 10:1296).

[0798] Table 8, below, summarizes the Fc modifications that increase binding to FcγRs or C1q, and thus, enhance immune effector functions, including ADCC, ADCP and CDC, and provides the corresponding modifications by Kabat numbering and by sequential numbering, with reference to the sequence of the IgG1 heavy chain constant domain set forth in SEQ ID NO:9. Any one or more of these modifications, alone or in various combinations, can be introduced into the IgG1 Fc portions of the constructs provided herein. Other modifications, known in the art to confer enhanced or increased immune effector functions, also are contemplated for use herein.

TABLE 8
IgG1 Fc Modifications that Enhance Immune Effector Functions

| | | Modifications by | |
|---|---|---|---|
| Modifications by EU | Modifications by Kabat | Sequential Numbering | |
| Numbering | Numbering | (SEQ ID NO: 9) | Effects |
| S239D | S252D | S122D | Increase binding to |
| | | | FcγRIIIa; enhance |
| | | | ADCC |
| I332E | I351E | I215E | Increase binding to |
| | | | FcγRIIIa; enhance |
| | | | ADCC |
| S239D/1332E | S252D/I351E | S122D/I215E | Increase binding to |
| | | | FcγRIIIa; enhance |
| | | | ADCC |
| S239D/A330L/1332E | S252D/A349L/1351E | S122D/A213L/1215E | Increase binding to |
| | | | FcγRIIIa; enhance |
| | | | ADCC |
| S298A/E333A/K334A | S317A/E352A/K353A | S181A/E216A/K217A | Increase binding to |
| | | | FcγRIIIa; enhance |
| | | | ADCC |
| F243L/R292P/Y300L/V305M | F256L/R309P/Y319L/V324M | F126L/R175P/Y183L/V188M | Increase binding toM |
| I/P396L | I/P424L | I/P279L | FcγRIIIa and |
| | | | FcγRIIa; enhance |
| | | | ADCC |
| L235V/F243L/R292P/Y300 | L248V/F256L/R309P/Y319 | L118V/F126L/R175P/Y183 | Increase binding to |
| L/P396L | L/P424L | L/P279L | FcγRIIIa; enhance |
| | | | ADCC |
| F243L/R292P/Y300L | F256L/R309P/Y319L | F126L/R175P/Y183L | Increase binding to |
| | | | FcγRIIIa; enhance |
| | | | ADCC |
| L234Y/G236W/S298A (1^{st} | L247Y/G249W/S317A (1^{st} | L117Y/G119A/S181A (1^{st} | Increase binding to |
| heavy chain) and | heavy chain) and | heavy chain) and | FcγRIIIa; enhance |
| S239D/A330L/1332E (2^{nd} | S252D/A349L/1351E (2^{nd} | S122D/A213L/1215E (2^{nd} | ADCC |
| heavy chain) | heavy chain) | heavy chain) | |
| L234Y/L235Q/G236W/S23 | L247Y/L248Q/G249W/S25 | L117Y/L118Q/G119W/S12 | Increase binding to |
| 9M/H268D/D270E/S298A | 2M/H281D/D283E/S317A | 2M/H151D/D153E/S181A | FcγRIIIa; enhance |
| (1^{st} heavy chain) and | (1^{st} heavy chain) and | (1^{st} heavy chain) and | ADCC |
| D270E/K326D/A330M/K3 | D283E/K345D/A349M/K3 | D153E/K209D/A213M/K2 | |
| 34E (2^{nd} heavy chain) | 53E (2^{nd} heavy chain) | 17E (2^{nd} heavy chain) | |
| A327Q/P329A | A346Q/P348A | A210Q/P212A | Increase binding to |
| | | | FcγRI |
| D265A/S267A/H268A/D27 | D278A/S280A/H281A/D28 | D148A/S150A/H151A/D15 | Increase binding to |
| 0A/K326A/S337A | 3A/K345A/S357A | 3A/K345A/S220A | FcγRIIa |
| T256A/K290A/S298A/E33 | T269A/K307A/S317A/E35 | T139A/K173A/S181A/E21 | Increase binding to |
| 3A/K334A | 2A/K353A | 6A/K217A | FcγRIIIa |
| G236A | G249A | G119A | Increase binding to |
| | | | FcγRIIa; enhances |
| | | | ADCP |
| G236A/1332E | G249A/1351E | G119A/1215E | Increase binding to |
| | | | FcγRIIa and |
| | | | FcγRIIIa; enhance |
| | | | ADCC and ADCP |
| G236A/S239D/1332E | G249A/S252D/I351E | G119A/S122D/1215E | Increase binding to |
| | | | FcγRI, FcγRIIa |
| | | | and FcγRIIIa; |
| | | | enhance ADCC |
| | | | and ADCP |
| G236A/S239D/A330L/1332 | G249A/S252D/A349L/1351 | G119A/S122D/A213L/1215 | Increase binding to |
| E | F | E | FcγRIIa and |
| | | | FcγRIIIa; enhance |
| | | | ADCC and ADCP |
| Biantennary glycan at N297 | Biantennary glycan at N314 | Biantennary glycan at N180 | Increases binding |
| | | | to FcγRIIIa; |
| | | | enhances ADCC |
| Afucosylated glycan at | Afucosylated glycan at | Afucosylated glycan at | Increases binding |
| N297 | N314 | N180 | to FcγRIIIa; |
| | | | enhances ADCC |
| K326W | K345W | K209W | Increase binding to |
| | | | C1q; enhance CDC |
| K326A | K345A | K209A | Increase binding to |
| | | | C1q; enhance CDC |
| E333A | E352A | E216A | Increase binding to |
| | | | C1q; enhance CDC |
| K326A/E333A | K345A/E352A | K209A/E216A | Increase binding to |
| | | | C1q; enhance CDC |
| | | | and preserve |
| | | | ADCC activity |
| K326W/E333S | K345W/E352S | K209W/E216S | Increase binding to |
| | | | C1q; enhance CDC |
| K326M/E333S | K345M/E352S | K209M/E216S | Increase binding to |
| | | | C1q; enhance CDC |
| | | | and preserve |
| | | | ADCC activity |
| K222W/T223W | K235W/T236W | K105W/T106W | Increase binding to |
| | | | C1q; enhance CDC |
| K222W/T223W/H224W | K235W/T236W/H237W | K105W/T106W/H107W | Increase binding to |
| | | | C1q; enhance CDC |
| D221W/K222W | D234W/K235W | D104W/K105K | Increase binding to |
| | | | C1q; enhance CDC |
| C220D/D221C | C233D/D234C | C103D/D104C | Increase binding to |
| | | | C1q; enhance CDC |
| | | | and preserve |
| | | | ADCC activity |
| C220D/D221C/K222W/T2 | C233D/D234C/K235W/T2 | C103D/D104C/K105W/T1 | Increase binding to |
| 23W | 36W | 06W | C1q; enhance CDC |
| H268F/S324T | H281F/S343T | H151F/S207T | Increase binding to |
| | | | C1q; enhance CDC |
| S267E | S280E | S150E | Increase binding to |
| | | | C1q; enhance CDC |
| H268F | H281F | H151F | Increase binding to |
| | | | C1q; enhance CDC |
| S324T | S343T | S207T | Increase binding to |
| | | | C1q; enhance CDC |
| S267E/H268F/S324T | S280E/H281F/S343T | S150E/H151F/S207T | Increase binding to |
| | | | C1q; enhance CDC |
| G236A/I332E/S267E/H268 | G249A/I351E/S280E/H281 | G119A/I215E/S150E/H151 | Increase binding to |
| F/S324T | F/S343T | F/S207T | C1q; enhance CDC |
| E345R | E366R | E228R | Increase binding to |
| | | | C1q; enhance |
| | | | CDC; IgG1 |
| | | | hexamer formation |
| E345R/E430G/S440Y | E366R/E461G/S471Y | E228R/E313G/S323Y | Increase binding to |
| | | | C1q; enhance |
| | | | CDC; IgG1 |
| | | | hexamer formation |

[0799] Therapeutic antibodies also can be engineered to reduce or eliminate immune effector functions. For purposes herein, in some embodiments, it is of interest, for example, to reduce or eliminate ADCC activity. Constructs herein that include Fc generally are modified to reduce or eliminate ADCC activity.

[0800] It is of interest to reduce or eliminate immune effector functions, for example, where: the therapeutic antibodies are antagonistic in order to prevent receptor-ligand interactions and signaling; the antibodies are receptor agonists to crosslink receptors and induce signaling; the antibodies are drug delivery vehicles that deliver a drug to antigen-expressing target cells; and, where the reduction or elimination of effector functions prevents target cell death or unwanted cytokine secretion. Reduced effector function also prevents antibody-drug conjugates from interacting with FcγRs, which reduces off-target cytotoxicity. The importance of reducing or eliminating effector functions became evident following adverse events associated with the administration of the first approved mAb, muromonab, which was designed to prevent T cell activation in transplant patients receiving a donor kidney, lung or heart. Patients administered muromonab experienced a dangerous induction of pro-inflammatory cytokines (i.e., a cytokine storm); this was due, in part, to the interaction of muromonab with FcγRs (see, e.g., Wang et al. (2018) Protein Cell 9(1):63-73; and Saunders, K. O. (2019) Front. Immunol. 10:1296).

[0801] There are many known mutations that reduce or eliminate receptor function. For example, replacements L235E and F234A/L235A in human IgG4, and L235E and L234A/L235A (all by EU numbering) in human IgG1 reduce FcγR and C1q binding, and reduce effector functions, such as inflammatory cytokine release. Inflammatory cytokine release from therapeutic antibodies, can result in adverse effects. The replacements S228P/L235E, when introduced into IgG4, also reduce binding to FcγRs; the S228P mutation improves stability of IgG4. The mutations S228P/F234A/L235A in the IgG4 Fc decrease binding to FcγRI, IIa and IIIa, and reduce ADCC and CDC. The triple mutant L234E/L235F/P331S in IgG1 Fc decreases binding to FcγRI, FcγRII, FcγRIII and C1q, and reduces CDC, the mutations L234A/L235A/P329G in the IgG1 Fc eliminate FcγRI, FcγRII, FcγRIII and C1q binding, and reduce ADCP. The mutations L234F/L235E/P331S also reduce binding to FcγRs and C1q, and reduce effector functions of the IgG1 Fc. The mutations G237A and E318A in the IgG1 Fc each decrease binding to FcγRII and reduce ADCP; the mutations D265A and E233P decrease binding to FcγRI, FcγRII and FcγRIII, and decrease ADCC and ADCP, and the mutations G236R/L328R decrease binding to all FcγRs and reduce ADCC. Crystal structure data revealed that conformational changes at residue P329, which packs between two conserved tryptophan residues that occur in all FcγRs, form a “proline sandwich,” can be detrimental to the interaction with FcγRs, and that modifications at residue D270 can negatively impact interactions with C1q (see, e.g., Wang et al. (2018) Protein Cell 9(1):63-73; Saunders, K. O. (2019) Front. Immunol. 10:1296; International Application Publication No. WO 2019/226750).

[0802] Induction of the complement cascade is associated with antibody injection site adverse reactions, and eliminating C1q binding to Fc, which is the initial even in the activation of CDC. Modification of Fc region eliminate C1q binding can be used to eliminate CDC in constructs containing Fc regions. Many of the mutations that eliminate FcγR binding also eliminate C1q binding, as shown above. For example, the mutation A330L disrupts C1q binding and reduces CDC, and also eliminates FcγRIIb binding. The mutations D270A, P329A, K322A and P331A also result in reduced C1q binding and reduced CDC activity (see, e.g., Saunders, K. O. (2019) Front. Immunol. 10:1296).

[0803] Glyco-engineering can be used to ablate FcγR and C1q binding. As discussed elsewhere herein, the glycan at residue N297 is a complex biantennary glycan. Modification of this glycan to a high mannose glycan (i.e., high mannose glycosylation) reduces the affinity of IgG1 Fc for C1q and reduces CDC activity. Mutations in the Fc that reduce or eliminate C1q and FcγRI binding also can result in an increase in galactosylation and sialylation of the N297 glycan; such mutations include F241A, V264A and D265A, for example. The mutations N297A, N297Q, N297D and N297G, by EU numbering, remove the glycosylation site at N297 and reduce effector functions, such as CDC and ADCC, by abrogating Fc interactions with C1q and FcγRs, respectively. The combination N297G/D265A almost completely abrogates binding to FcγRs and C1q. An IgG3 Fc lacking glycosylation (the aglycone Fc) has reduced binding to FcγRI and C1q. (see, e.g., Wang et al. (2018) Protein Cell 9(1):63-73; Saunders, K. O. (2019) Front. Immunol. 10:1296).

[0804] To reduce or eliminate Fc effector functions, large portions of Fc regions from different subclasses, that lack opposing functions, can be exchanged to generate cross-subclass Fc regions. For example, IgG2 has poor FcγR binding but binds C1q, and IgG4 lacks C1q binding but reacts with FcγRs; thus, combinations of IgG2 and IgG4 CH domains that are devoid of both C1q and FcγR binding, can be constructed. In general, in IgG1/IgG4 chimeras, the hinge and C_{H}1 domain is from IgG2, and the CH2 and C_{H}3 domains are from IgG4. Since IgG1 and IgG3 recruit complement more effectively than IgG2 and IgG4, and because IgG2 and IgG4 are limited in their ability to induce ADCC, a cross-subclass approach can reduce effector function. For example, the anti-C5 mAb eculizumab, contains IgG2 residues 118-260 (by EU numbering; corresponding to residues 114-273 by Kabat numbering, and residues 1-139 with reference to SEQ ID NO:11), and IgG4 residues 261-447 (by EU numbering; corresponding to residues 274-478 by Kabat numbering, and residues 141-327 with reference to SEQ ID NO:15), and has limited or undetectable effector function. Similarly, an IgG2 variant (IgG2m4) with the point mutations H268Q/V309L/A330S/P331S from IgG4 (by EU numbering; corresponding to H281Q/V328L/A349S/P350S by Kabat numbering, and H147Q/V188L/A209S/P210S with reference to SEQ ID NO:11) lacks binding to all FcγRs and C1q and exhibits reduced effector functions. A variant (called IgG2a) containing the IgG2 to IgG4 cross-subclass mutations V309L/A330S/P331S (by EU numbering; corresponding to V328L/A349S/P350S by Kabat numbering, and V188L/A209S/P210S with reference to SEQ ID NO:11), and the non-germline mutations V234A/G237A/P238S/H268A (by EU numbering; corresponding to V247A/G250A/P251S/H281A by Kabat numbering, and V114A/G116A/P117S/H147A with reference to SEQ ID NO:11), eliminates binding to FcγRs and C1q and exhibit undetectable CDC, ADCC and ADCP activities. The IgG1/IgG4 cross-subclass variant IgG1a, which includes the mutations L234A/L235A/G237A/P238S/H268A/A330S/P331S, lacks binding to FcγRI and IIIa, and has very weak binding to FcγRIIa and IIb at high concentrations of antibody, resulting in reduced ADCC and CDC activities (see, e.g., Wang et al. (2018) Protein Cell 9(1):63-73; Saunders, K. O. (2019) Front. Immunol. 10:1296).

[0805] Tables 9 and 10, below, summarize some IgG1 and IgG4 Fc modifications that reduce or eliminate binding to FcγRs and/or C1q, and thus, reduce or eliminate immune effector functions, including ADCC, ADCP and CDC, which can be introduced into the Fc regions in constructs herein. The tables provide the corresponding modifications by Kabat numbering and by sequential numbering, with reference to the sequence of the IgG1 heavy chain constant domain set forth in SEQ ID NO:9, or the IgG4 heavy chain constant domain set forth in SEQ ID NO:15. Any one or more of these modifications, alone or in various combinations, can be introduced into the IgG1 Fc portions of the constructs provided herein. Other modifications, known in the art to reduce or eliminate immune effector functions, also are contemplated for use herein.

TABLE 9
IgG1 Fc Modifications that Reduce or Eliminate Immune Effector Functions

| | | Modifications by | |
|---|---|---|---|
| Modifications by | Modifications by | Sequential Numbering | |
| EU Numbering | Kabat Numbering | (SEQ ID NO: 9) | Effects |
| L235E | L248E | L118E | Reduces FcγR binding; reduces ADCC |
| L234A/L235A | L247A/L248A | L117A/L118A | Reduce FcγR and C1q binding; reduced |
| | | | ADCC, ADCP and CDC |
| L234E/L235F/P331S | L247E/L248F/P350S | L117E/L118F/P214S | Reduce FcγR and C1q binding; reduce |
| | | | CDC |
| L234F/L235E/P331S | L247F/L248E/P350S | L117F/L118E/P214S | Reduce FcγR and C1q binding; reduce |
| | | | effector functions |
| L234A/L235A/P329G | L247A/L248A/P348G | L117A/L118A/P212G | Eliminate FcγR and C1q binding; |
| | | | reduce ADCP and CDC |
| L234A/L235A/G237A/ | L247A/L248A/G250A/ | L117A/L118A/G120A/ | Reduced binding to FcγR1, IIa, IIb and |
| P238S/H268A/A330S/ | P251S/H281A/A349S/ | P121S/H151A/A213S/ | IIIa; reduced ADCC and CDC |
| P331S | P350S | P214S | |
| G236R/L328R | G249R/L347R | G119R/L211R | Reduced binding to FcγRs; reduced |
| | | | ADCC |
| G237A | G250A | G120A | Reduces binding to FcγRII; reduced |
| | | | ADCP |
| E318A | E337A | E201A | Reduces binding to FcγRII; reduced |
| | | | ADCP |
| D265A | D278A | D148A | Reduces binding to FcγRI, II, III; |
| | | | reduced ADCC and ADCP |
| E233P | E246P | E116P | Reduces binding to FcγRI, II, III; |
| | | | reduced ADCC and ADCP |
| N297A | N314A | N180A | Remove glycosylation site; decrease |
| | | | interaction with FcγRs; reduce effector |
| | | | functions (CDC, ADCC, ADCP) |
| N297Q | N314Q | N180Q | Remove glycosylation site; decrease |
| | | | interaction with FcγRs; reduce effector |
| | | | functions (CDC, ADCC, ADCP) |
| N297D | N314D | N180D | Remove glycosylation site; decrease |
| | | | interaction with FcγRs; reduce effector |
| | | | functions (CDC, ADCC, ADCP) |
| N297G | N314G | N180G | Remove glycosylation site; decrease |
| | | | interaction with FcγRs; reduce effector |
| | | | functions (CDC, ADCC, ADCP) |
| N297G/D265A | N314G/D278A | N180G/D148A | Reduces binding to FcγRs and C1q; |
| | | | reduces effector functions |
| A330L | A349L | A213L | Reduced C1q binding; reduced CDC |
| D270A | D283A | D153A | Reduced C1q binding; reduced CDC |
| P329A | P348A | P212A | Reduced C1q binding; reduced CDC |
| P331A | P350A | P214A | Reduced C1q binding; reduced CDC |
| K322A | K341A | K205A | Reduced C1q binding; reduced CDC |
| V264A | V277A | V147A | Reduced C1q binding; reduced CDC |
| F241A | F254A | F124A | Reduced C1q binding; reduced CDC |

TABLE 10
IgG4 Fc Modifications that Reduce or Eliminate Immune Effector Functions

| | | Modifications by | |
|---|---|---|---|
| Modifications by | Modifications by | Sequential Numbering | |
| EU Numbering | Kabat Numbering | (SEQ ID NO: 15) | Effects |
| L235E | L248E | L115E | Reduces FcγR binding; reduces ADCC |
| F234A/L235A | F247A/L248A | F114A/L115A | Reduce FcγR and C1q binding; reduced |
| | | | ADCC, ADCP and CDC |
| S228P/L235E | S241P/L248E | S108P/L115E | Reduce FcγR binding; reduced effector |
| | | | functions |
| S228P/F234A/L235A | S241P/F247A/L248A | S108P/F114A/L115A | Reduced binding to FcγRI, IIa and IIIa; |
| | | | reduced ADCC and CDC |

ii. Other Modifications of Fc portions

[0806] The Fc portion also can be modified to increase binding to inhibitory FcγRs, which results in the suppression of the immune response. Therapeutic antibodies with immunosuppressive Fc modifications are advantageous for the treatment of inflammatory diseases. These mutations can be incorporated into the Fc portions of constructs herein that are intended for treatment of diseases and conditions with an inflammatory component or etiology or involvement. For example, the immunosuppressive version of an anti-CD19 antibody (XmAb5871; Xencor), containing the mutations S267E/L328F (by EU numbering), binds inhibitory FcγRIIb with ~430-fold increased affinity, and depletes CD19⁺B-cells in patients with systemic lupus erythematosus (SLE). The same mutations, when introduced into a humanized anti-IgE antibody (XmAb7195; Xencor), prevent the binding of IgE to its high-affinity receptor (FcγRI) that is present on basophils and mast cells, increases affinity for FcγRIIb by ~430-fold, and is used for the treatment of allergies, including allergic asthma. The anti-CD3 antibody TRX4 (Tolerx), containing the aglycosylating Fc mutation N297A (by EU numbering), suppresses pathogenic T-cells and restores normal Treg cell activity in type-1 diabetes (autoimmune) patients (see, e.g., Saxena et al. (2016) Front. Immunol. 7:580).

[0807] An additional example is the monomeric IgG1 Fc (mFc), containing the mutations L351S/T366R/L368H/P395K (by EU numbering), which binds FcRn and exhibits similar in vivo half-life to dimeric Fc, and selectively binds FcγRI with high affinity, but does not bind FcγRIIIa, abrogating Fc-mediated cytotoxicity, including ADCC and CDC. FcγRI is expressed on inflammation-related cells, such as inflammatory macrophages. Targeting this receptor can be used for the treatment of chronic inflammatory diseases, such as arthritis, multiple sclerosis and cancer. The variant mFc, when fused to the Pseudomonas exotoxin A fragment (PE38), kills FcγRI macrophage-like U937 cells. Neither the variant mFc, nor the fusion protein, exhibits any cytotoxicity (ADCC or CDC) in vitro (see, e.g., Ying et al. (2014) mAbs 6(5):1201-1210).

[0808] Modifications that increase binding to, or that confer selective binding to, inhibitory FcγRIIb, and/or FcγRI but not FcγRIIIa, can be engineered into the IgG Fc regions in the TNFR1 antagonists and TNFR1 antagonist/TNFR2 agonist constructs provided herein. These modifications include, but are not limited to, one or more of S267E, N297A, L328F, L351S, T366R, L368H, P395K, S267E/L328F, L351S/T366R/L368H/P395K, and combinations thereof, by EU numbering. Table 11, below, shows the corresponding replacements by Kabat numbering, and by sequential numbering, with reference to the sequence of the IgG heavy chain constant domain set forth in SEQ ID NO:9.

TABLE 11
IgG1 Fc Modifications that Increase Binding to Inhibitory FcγRIIb

| | Modifications | Modifications by |
|---|---|---|
| Modifications by EU | by Kabat | Sequential Numbering |
| Numbering | Numbering | (SEQ ID NO: 9) |
| S267E | S280E | S150E |
| N297A | N314A | N180A |
| L328F | L347F | L211F |
| L351S | L372S | L234S |
| T366R | T389R | T249R |
| L368H | L391H | L251H |
| P395K | P423K | P278K |
| S267E/L328F | S280E/L347F | S150E/L211F |
| L351S/T366R/L368H/ | L372S/T389R/ | L234S/T249R/L251H/P278K |
| P395K | L391H/P423K | |

d. Additional Activity Modifiers—Fusion Proteins that Include Portions or Entire Polypeptides that Increase Serum Half-Life

[0809] Properties of the constructs can be altered by adding full-length polypeptides or portions thereof that increase serum half-life, but that do not substantially or do not alter the interaction of a construct with TNFR1 and/or TNFR2. This includes albumination and other such modifications (see discussion above regarding half-life extenders; reviewed in, Strohl (2015) BioDrugs 29(4):215-239, see also, Tan et al. (2018) Current Pharmaceutical Design 24:4932-4946).

### G. Assessing TNFR1 Antagonist and TNFR1 Antagonist/TNFR2 Agonist Construct Activity and Efficacy

[0810] If or as necessary, the constructs provided herein can be assessed for activity and efficacy using any assays, in vivo and/or in vitro, known to those of skill in the art, to assess properties of the constructs and/or suitability for treatment of particular diseases, disorders, or conditions. These assays also can be used to monitor treatment and/or predict response or select subjects for treatment. Exemplary assays are described in sections that follow.

[0811] In general, the antagonist constructs herein are those that are non-competitive; they generally are the constructs that lock the receptor in an inactive conformation, which as discussed above, means that selecting for high affinity is of lesser importance than selecting for antagonist activity.

### 1. Disease Activity Score (DAS28)

[0812] The 28-joint-count Disease Activity Score (DAS28; or Disease Activity Score of 28 joints) is a measure of disease activity in rheumatoid arthritis (RA), and is a simplification of the original DAS score, which requires 44 joints to be counted. The 28 joints that are counted include proximal interphalangeal joints (10 joints), metacarpophalangeal joints (10 joints), wrists (2), elbows (2), shoulders (2) and knees (2). The DAS28 is indicative of RA disease activity and response to treatment, and thus, is used in clinical trials for the evaluation of therapeutics for RA. The DAS28 is based on a count of 28 swollen and tender joints, with a score ranging from 0-10, with higher values indicating higher disease activity. In addition to counting the number of swollen and tender joints (out of the 28), the DAS28 includes a measurement of the erythrocyte sedimentation rate (ESR) or C reactive protein (CRP), which are acute phase reactants/blood markers of inflammation, as well as a general health (GH) assessment, representing the patient's self-assessment of disease activity, scored on a 100 mm visual analog scale (VAS), with a value of 0 meaning “no activity” and a value of 100 meaning “highest activity possible.” The DAS28 usually is combined with other measurements of disease severity, such as pain and grip strength, and physical function is assessed using a Health Assessment Questionnaire (HAQ).

[0813] To calculate DAS28 values, using ESR or CRP levels, the following formulas are used, respectively:

$$DAS 28 ( ESR ) = 0.56 \times √ ( TJC 28 ) + 0.28 \times √ ( SJC 28 ) + 0.014 \times GH + 0.7 \times ln ( ESR ) ;$$

$$DAS 28 ( CRP ) = 0.56 \times √ ( TJC 28 ) + 0.28 \times √ ( SJC 28 ) + 0.014 \times GH + 0.36 \times ln ( CRP + 1 ) + 0.96 ;$$

[0814] where TJC=tender joint count and SJC=swollen joint count.

[0815] A value of <2.6 indicates remission, value of <3.2 (>2.6 but ≤3.2) indicates low disease activity, a value of >3.2 but ≤5.1 indicates moderate disease activity, and a value of greater than 5.1 indicates high disease activity (i.e., active disease). An improvement (i.e., reduction in DAS28 score/value) of ≥1.2 indicates a good response/improvement; an improvement of >0.6 to ≤1.2 indicates a moderate response; and a DAS28 decrease of ≤0.6 indicates no improvement (see, e.g., Prevoo et al. (1995) Arthritis & Rheumatism 38(1):44-48; Wells et al. (2009) Ann. Rheum. Dis. 68:954-960).

[0816] The therapeutic efficacy of the selective TNFR1 antagonists, TNFR2 agonists, and/or bi-specific constructs containing the combination thereof, provided herein, can be evaluated by calculating the DAS28(ESR) or DAS28(CRP) before, during, and after treatment.

### 2. SOMAscan® Proteomic Analysis and Other Proteomic Tools for Quantifying Analytes

[0817] The SOMAscan® proteomic assay (SomaLogic, Inc.; Boulder, CO.) is an aptamer-based multiplexed, sensitive, quantitative and reproducible proteomic tool that can simultaneously measure the quantities of more than 5,000 protein analytes in a sample, such as serum, plasma or cerebrospinal fluid, as small as 150 μL in volume. Other biological matrices, such as cell culture supernatant, cell and tissue lysates, synovial fluid, and bronchoalveolar and nasal lavage, also can be used. Due to its ability to quantify a broad range or protein targets simultaneously, the SOMAscan® assay is optimized for protein biomarker discovery, and has been used to identify biomarker signatures associated with several diseases, including, for example, non-small cell lung cancer, Alzheimer's diseases, cardiovascular disease and inflammatory bowel disease. The SOMAscan® assay can be used to determine the protein signatures of, for example, RA patients, by analyzing samples taken before and after the initiation of treatment with the TNFR1 antagonist, TNFR2 agonist, and bispecific constructs provided herein. In this manner, the responses in patients can be monitored at an early time point in treatment and throughout treatment.

[0818] The SOMAscan® assay employs protein-capture reagents, known as Slow Off-rate Modified Aptamer (sold as SOMAmer® aptamers) reagents, which are short, single-stranded DNA-based protein affinity reagents constructed with chemically modified nucleotides that mimic amino acid side chains, have slow off-rates, and allow specific, high affinity binding to protein targets. The assay measures proteins in their native, folded conformations (i.e., tertiary structure), and does not detect unfolded and denatured (i.e., inactive) proteins. For the SOMAscan® assay, a SOMAmer®-protein binding step is followed by a series of partitioning and wash steps, whereby proteins in a biological sample are quantified by transforming each individual protein concentration into a corresponding SOMAmer® reagent concentration (SOMAmer®-based DNA signal), which then is quantified by standard DNA detection techniques, such as microarrays or qPCR. The assay takes advantage of SOMAmer reagents' dual nature as protein affinity-binding reagents with defined three-dimensional structures, and as containing unique nucleotide sequences recognizable by specific DNA hybridization probes.

[0819] SOMAmer® reagents are prepared with three tags, and contain a fluorophore linked to biotin via a photocleavable linker. Briefly, for the assay, the biological sample of interest is diluted, and then incubated with the respective SOMAmer® reagent mixes that are pre-immobilized onto streptavidin (SA)-coated beads. The SOMAmer® reagents bind to proteins in the biological sample, and the beads are washed to remove unbound proteins. Any non-specific complexes that form possess fast off-rates. Proteins that remain bound to their cognate SOMAmer® reagents are tagged using an NHS-biotin reagent, and a polyanionic competitor solution is added that breaks up any non-specific complexes. Protein-SOMAmer® complexes and unbound (free) SOMAmer® reagents are released from the streptavidin beads by cleaving the photocleavable linker using ultraviolet light. The photo-cleavage eluate, which contains all SOMAmer® reagents (some bound to biotin-labeled protein and some free), then is incubated with a second streptavidin-coated bead that binds the biotinylated proteins and the biotinylated protein-SOMAmer® complexes, and unbound material is removed by subsequent washing steps. In the final elution step, protein-bound SOMAmer® reagents are released from their cognate proteins using denaturing conditions, and the SOMAmer® reagents are quantified by standard DNA quantification techniques, such as by hybridization to custom DNA microarrays and measurement of the fluorophore tag. The data are reported in relative fluorescent units (RFUs), following normalization and calibration, and the measured SOMAmer® reagent signals correlate with the protein levels found in the biological sample (see, e.g., Gold et al. (2010) PLoS ONE 5(12):e15004; Candia et al. (2017) Sci. Reports 7:14248; Tanaka et al. (2018) Aging Cell. 17:e12799).

3. Transcriptome Analysis to Predict Responsiveness to Therapy and to Select Subjects Likely to Benefit from Treatment

[0820] Traditional anti-TNF therapies, i.e., TNF blockers, such as etanercept, infliximab and others, are met with ~30% non-responsiveness in RA patients. There, however, are clinical markers that can predict the efficacy of these anti-TNF therapies. The analysis of genes that are differentially expressed following anti-TNF therapy with etanercept, using global transcriptome analysis to determine RNA expression signatures in peripheral blood mononuclear cells (PBMCs), has been performed. Similar transcriptome analyses can be performed to evaluate the efficacy of the TNFR1 antagonists and the TNFR1 antagonist/TNFR2 agonist constructs herein, and/or to evaluate patient responsiveness to them.

[0821] In an exemplary protocol, blood samples are obtained from patients before and after treatment, and PBMCs are separated using a Ficoll density gradient, after which the populations of CD3⁺, CD14⁺, CD19⁺ and CD56⁺cells are evaluated using flow cytometry. Total RNA then is extracted, for example, using the Qiagen RNeasy® kit, and microarray analysis is used (e.g., using Affymetric® microarray technology) to analyze the expression profiles of tens of thousands of known genes in PBMCs to identify the profiles of responders/non-responders. The gene expression profiles can be determined at an early stage of treatment to quickly identify those who will be nonresponders. For example, by using this method to identify reliable biomarkers for predicting the therapeutic efficacy of etanercept in RA patients, gene pairs with a prediction accuracy of >89%, and gene triplets with a prediction accuracy of >95%, were identified. These include, for example, genes involved in TNF signaling via the NF-κB pathway, genes involved in NF-κB-independent signaling, and genes involved in the regulation of cellular and oxidative stress responses. For example, the gene triplets identified include TNFAIP3, encoding TNF-α-induced protein 3, a zinc finger protein shown to inhibit NF-κB activation; PDE4B, encoding a (cAMP)-specific cyclic nucleotide phosphodiesterase that is involved in NF-κB-independent signal transduction; and RAPGEF1, encoding Rap guanine nucleotide-exchange factor 1, an activator of RAS signaling. The expression of all three of these genes was downregulated 3 days following administration of etanercept in responders compared to in nonresponders. Other genes evaluated include CCL4, CXCR4, CCL3, PIGO, FSD1, RUNX1, LGALS13, PTPRD, IL1B, ADAM12, and HCG4P6 (see, e.g., Koczan et al. (2008) Arthritis Research & Therapy 10:R50).

[0822] The expression levels of a subset of genes of interest can be measured by quantitative real-time PCR (RT-PCR) using pre-designed primers and probes, to validate the results obtained with microarray analysis. To calculate the change in gene expression of selected genes, the ΔΔC_{T} method can be used, whereby the threshold cycle (C_{T}) values for specific mRNA expression in a sample are normalized to the C_{T} values of, for example, GAPDH mRNA, in the sample, and the gene expression change (ΔΔC_{T}) is defined by the difference in the C_{T} values after and before treatment (see, e.g., Koczan et al. (2008) Arthritis Research & Therapy 10:R50).

### 4. L929 Cytotoxicity Assay

[0823] TNFR1-mediated processes and cellular responses can be determined, for example, by evaluating TNF-induced cell death with an L929 cytotoxicity assay, whereby the TNFR1 antagonist inhibits TNF-induced cytotoxicity. Briefly, L929 mouse fibroblasts are plated in microtiter plates and incubated overnight with the TNFR1 antagonist, 100 μg/ml TNF and 1 mg/ml actinomycin D. Cell viability is measured by reading absorbance at 490 nm following incubation with 3-(4,5-dimethylthiazol-2-yl)-5-(3-carboxymethoxyphenyl)-2-(4-sulfophenyl)-2H-tetrazolium (MTS). The TNFR1 antagonist decreases TNF-mediated cytotoxicity, leading to an increase in absorbance, as compared to a TNF only control.

### 5. HeLa IL-8 Assay

[0824] The activity of the TNFR1 antagonists can be determined using a HeLa IL-8 assay, where the ability of the antagonists to neutralize TNF-induced IL-8 secretion in HeLa cells is evaluated. Briefly, HeLa cells are plated in microtiter plates overnight, in the presence of varying concentrations of TNFR1 antagonist and 300 μg/ml TNF. The supernatant then is aspirated off, and the concentration of IL-8 is measured using a sandwich ELISA. TNFR1 antagonist activity decreases IL-8 secretion into the supernatant, compared to a TNF only control.

### 6. HUVEC Assay

[0825] A human umbilical cord vein endothelial cell (HUVEC) assay can be used to determine the activity of the TNFR1 antagonists herein. Treatment of HUVECs with TNF results in the upregulation of VCAM-1 expression on the cells, which can be determined, for example, by ELISA. Since TNFR1 antagonists inhibit the action of TNF, VCAM-1 expression is reduced in HUVECs in the presence of the antagonists. The level of inhibition of TNF-induced VCAM-1 expression by the TNFR1 antagonist then is determined by plotting the concentration of the antagonist against the percent inhibition of VCAM-1 expression.

[0826] In accord with a protocol for this assay, HUVECs are cultured overnight, and then incubated with the TNFR1 antagonist for 1 hour, followed by stimulation with TNF (1 ng/mL) for 23 hours. Cells incubated with medium only are used as a negative control, and cells incubated with TNF only are used as a positive control. Cell culture supernatants a then are aspirated, and the cells are washed three times with ice cold PBS, and lysed by the addition of ice-cold Tris-Glycerol lysis buffer (40 mM Tris, 274 mM NaCl, 2% Triton-X-100, 20% glycerol, 50 mM NaF, 1 mM Na₃VO₄, 1× protease inhibitor tablet per 10 mL), then incubated for 15 mins on ice. The cell lysates then are used in a VCAM-1 sandwich ELISA. To calculate inhibition of TNF-induced VCAM-1 expression, the % inhibition of maximal VCAM-1 expression (i.e., as measured in the positive control)=

{100−[(OD value at antagonist conc.)/(OD value of positive control)]}×100.

[0827] The EC₅₀ values then are determined by plotting antagonist concentration against percentage inhibition, for example, using available software such as GraphPad Prism software.

### 7. Quantification and Evaluation of Treg Cell Activity

[0828] To determine the effects of the TNFR1 antagonist and TNFR1 antagonist/TNFR2 agonist constructs on Tregs, the numbers of Tregs can be quantified before and after treatment, as well as during treatment, by isolating peripheral blood mononuclear cells (PBMCs) from blood samples, such as by using Ficoll-Paque methods, followed by monoclonal antibodies (mAbs) and paramagnetic beads, or other similar methods known in the art, to isolate CD4⁺CD25⁺Tregs, as well as CD4⁺CD25⁻ non-regulatory T cells. Using flow cytometry, and immunostaining with mAbs against CD4 and CD25 (for Tregs), or CD4 and CTLA-4 (for non-regulatory T cells), the numbers of each cell type can be quantified (see, e.g., Vigna-Perez et al. (2005) Clin. Exp. Immunol. 141(2):372-380).

[0829] CD4⁺CD25⁺Tregs suppress the proliferation of CD4⁺CD25⁻ T cells. To test for the activity of Tregs from treated patients, a cell proliferation assay can be used, in which the Tregs and T cells are cultured together for 48 hours with phytohemagglutinin (PHA, to stimulate T cells). ³H-TdR (tritiated thymidine) is added for the last 12 hours of culture, and cells then are harvested, and proliferation is determined using a liquid scintillation counter. CD4⁺CD25⁻ T cells, cultured alone, are used as a control, and results are expressed in terms of the stimulation index (SI) of cell proliferation, which is calculated using the formula:

SI=(cpm of cells with PHA)÷(cpm of cells cultured with medium only),

where cpm is counts per minute, as determined by the counted radioactivity (see, e.g., Vigna-Peréz et al. (2005) Clin. Exp. Immunol. 141(2):372-380).

[0830] To test for immune reactivity against M. tuberculosis, PBMCs are cultured for 72 hours in complete medium, in the presence of a whole protein extract of the bacterium. ³H-TdR (tritiated thymidine) is added for the last 12 hours of culture, and cells then are harvested, and proliferation is determined using a liquid scintillation counter. Results are expressed as the stimulation index, as described above. For in vivo reactivity against M. tuberculosis, a standard PPD (purified protein derivative) skin test can be used (see, e.g., Vigna-Perez et al. (2005) Clin. Exp. Immunol. 141(2):372-380).

### 8. Evaluation of Binding Properties of the TNFR1 Antagonist Constructs

[0831] The specific binding of an antibody or antibody fragment or multi-specific constructs, such as the constructs provided herein, to TNFR1 and/or TNFR2 (e.g., human TNFR1 and/or TNFR2) can be assessed by any of a variety of known methods. The affinity can be represented quantitatively by various metrics, including the concentration of the TNFR1 antagonist, TNFR2 agonist, or multi-specific construct, needed to achieve half-maximal potentiation of TNFR1 and/or TNFR2 signaling in vitro (EC₅₀), and the equilibrium constants (K_{D}) of the antagonist-TNFR1 and/or agonist-TNFR2 complex dissociation. The equilibrium constant, K_{D}, which describes the interaction of TNFR1 or TNFR2 with a binder, such as a construct (binder) provided herein, is the chemical equilibrium constant for the dissociation reaction of a TNFR1-binder construct complex or TNFR2-binder complex into solvent-separated TNFR1 or TNFR2 and binder molecules that do not interact with one another.

[0832] The TNFR1 antagonists, TNFR2 agonists, and multi-specific constructs also can be characterized by a variety of in vitro binding assays. Examples of experiments that can be used to determine the KD or EC₅₀ include, for example, surface plasmon resonance (SPR, e.g., BIAcore™ analysis), isothermal titration calorimetry, fluorescence anisotropy, and ELISA-based assays, among others. ELISA is a particularly useful method for analyzing antibody activity, as such assays typically require minimal concentrations of antibodies. A common signal that is analyzed in a typical ELISA assay is luminescence, which is typically the result of the activity of a peroxidase conjugated to a secondary antibody that specifically binds a primary antibody (e.g., a TNFR1-antagonist or TNR1 antagonnist-TNFR2-agonist bi-specific construct provided herein).

[0833] The kinetics of association and dissociation of the TNFR1 antagonist with TNFR1, or the TNFR2 agonist with TNFR2 can be quantitatively characterized, for example, by monitoring the rate of antibody-antigen complex formation according to established procedures. For example, one can use surface plasmon resonance (SPR) to determine the rate constants for the formation (kₒₙ) and dissociation (k_{off}) of an antagonist-TNFR1 or agonist-TNFR2 complex. The equilibrium constant (K_{D}) can be determined from these data, since the equilibrium constant of this unimolecular dissociation can be expressed as the ratio of the k_{off} to kₒₙ values. SPR is a technique that is advantageous for determining kinetic and thermodynamic parameters of receptor-antibody (or other binder) interactions, since the experiment does not require that one component be modified by attachment of a chemical label. Rather, the receptor typically is immobilized on a solid metallic surface which is treated in pulses with solutions of increasing concentrations of antibody or binder (i.e., TNFR1 antagonist or TNFR2 agonist, or bi-specific constructs thereof). Antibody-receptor binding induces distortion in the angle of reflection of incident light at the metallic surface, and this change in refractive index over time as antibody is introduced to the system can be fit to established regression models known in the art in order to calculate the association and dissociation rate constants of an antibody-receptor interaction.

### 9. Antibody-Dependent Cellular Cytotoxicity (ADCC) and Complement-Dependent Cytotoxicity (CDC) Assays

[0834] Antibody-dependent cellular cytotoxicity (ADCC) and complement-dependent cytotoxicity (CDC) assays can be used to evaluate the immune effector functions/cytotoxicity of the TNFR1 antagonist, TNFR2 agonist, and multi-specific constructs provided herein that contain an Fc monomer or dimer. In general the Fc portion(s) is/are modified to eliminate or substantially reduce (to eliminate or reduce adverse side effects to a tolerable level) ADCC or ADCC and CDC effector functions. Such assays are well known in the art (see, e.g., Ying et al. (2014) mAbs 6(5):1201-1210). For example, for an exemplary ADCC assay, mesothelin-negative A431 or mesothelin-positive H9 cells are incubated with the TNFR1 antagonist, TNFR2 agonist, or multi-specific constructs provided herein for 30 min, followed by the addition of the target cells to wells containing the effector cells (e.g., PBMCs), at an effector to target cell ratio of 50:1. After a 24 hour incubation, the lysis of the target cells is measured using the CytoTox-ONE Homogenous Membrane Integrity Assay (Promega), according to the manufacturer's protocol.

[0835] For an exemplary CDC assay, A431 and H9 cells are washed in serum-free RPMI and density adjusted to 1 million/mL in serum-free RPMI. 50 μL of cell suspension then is incubated with 50 μL of TNFR1 antagonist, TNFR2 agonist, or multi-specific construct dilution in RPMI. A negative control contains 50 μL of cell suspension with 50 μL of RPMI, and a positive control contains target cells lysed with 1% Triton X-100 in a final volume of 150 μL. Fresh human plasma is diluted in PBS (1:4) and clarified with centrifugation, and then 50 μL of diluted plasma is added to each cell/construct mixture and incubated in 96-well plates at 37° C., to allow for complement-mediated cell lysis. Following a 3 hour incubation, 100 μL of supernatant is transferred to a white plate, and 100 μL substrate from the CytoTox-ONE Homogenous Membrane Integrity Assay Kit (Promega) is added. The plate then is incubated for 10 min at room temperature, and fluorescent signals are read using a fluorimeter, with an excitation wavelength of 530 nm and emission wavelength of 590 nm. The CDC of target cells is expressed as the percent of the experimental sample to the positive control.

### 10. Disease Models

[0836] The selective TNFR1 antagonists, TNFR2 agonists, and multi-specific constructs, provided herein, can be assessed in any clinically relevant disease model known to one of skill in the art, to determine their effects on autoimmune and inflammatory and other diseases or disorders that are mediated by or involve TNF in their etiology. Exemplary disease models include, but are not limited to, collagen-induced arthritis (CIA), rheumatoid arthritis synovial membrane mononuclear cell cultures, the Tg197 mouse model of arthritis, AARE mouse models of arthritis/IBD, the mouse dextran sulfate sodium (DSS) induced model of IBD, and the experimental autoimmune encephalomyelitis (EAE) model for multiple sclerosis. Other models are known to those of skill in the art. See, e.g., Malaviya et al. (2017) Pharmacol Ther. 180:90-98, which provides numerous models for testing the constructs for treating inflammatory lung diseases; Feldmann et al. (2020) Lancet 395:1407-1409, directed to use of anti-TNF therapies, and models, treatments for COVID-19; Shi et al. (2013) Crit. Care 17(6):R301, use of anti-TNF therapies for treating H1N1, and models for viral infection; and Orti-Casan et al. (2019) Front. Neurosci. 13:49, which describes that activating TNFR2 for treating Alzheimer's disease is advantageous, evidencing the approach herein that TNF blockers, which inhibit TNFR1 and TNFR2, are problematic. The following is a non-exhaustive discussion of diseases, disorders, and conditions that can be treated with constructs provided herein, and exemplary models for each. These are exemplary; the skilled person can select appropriate models for a particular construct and targeted disease, disorder, or condition. Because the anti-TNFR1 and TNFR2 antagonist/agonist constructs provided herein are intended for use for targeting human TNFR1/TNFR2, they are not expected to work as well in reacting/interacting with TNFR1/TNFR2 from non-human, particularly non-primate, species. For testing, in non-human models, such as rodent models, the model, such as a mouse model, is transgenic for human TNFR1 and human TNFR2. They can be used against a background of murine TNFR1/2 knockout mice for in vivo models of inflammation and autoimmune disease. Alternatively, severely immunocompromised mice (such as, NOD/NSG mice) mouse transplanted with human CD34+ stem cells, can be used for this purpose. Alternatively, human rheumatoid arthritis synovial cells can be transplanted into immunodeficient mice, resulting in RA-like inflammation (see, e.g., Schinnerling et al. (2019) Front Immunol. 10:203, for a description of such models).

a. Collagen-Induced Arthritis (CIA)

[0837] Type II collagen-induced arthritis (CIA) can be induced in mice as a model of autoimmune inflammatory joint disease that is histologically similar to RA, and is characterized by inflammatory synovitis, pannus formation, and erosion of cartilage and bone. To induce CIA, bovine type II collagen (B-CII), in the presence of complete Freund's adjuvant, is injected intradermally at the base of the tail. After 21 days, mice can be re-immunized using the same protocol. To examine the effects of the selective TNFR1 antagonists, TNFR2 agonists, and multi-specific constructs provided herein, 3 weeks following the initial challenge with B-CII, or upon the development of signs of arthritis, selective TNFR1 antagonists, TNFR2 agonists, or multi-specific constructs, or control can be administered intraperitoneally twice weekly for 3 weeks. Mice can be sacrificed 7 weeks following the initial immunization for histologic analysis.

[0838] To assess the therapeutic effect of the constructs on established disease, they can be administered daily for a total of 10 days following the onset of clinical arthritis in one or more limbs. The degree of swelling in the initially affected joints can be monitored by measuring paw thickness using calipers. Serum can be drawn from mice for the measurement of proinflammatory cytokines and chemokines, such as, for example, granulocyte-macrophage colony stimulating factor (GM-CSF), interleukin-10 (IL-10), IL-1β, IL-6, IL-8, RANTES (CCL5) and monocyte chemoattractant protein 1 (MCP-1; also known as CCL2).

[0839] In another example, primate models are available for RA treatments. Response of tender and swollen joints (e.g., as measured by clinical arthritic scores) can be monitored in subjects treated with recombinant therapeutic TNFR1 antagonistic, TNFR2 agonistic, or bispecific constructs, and controls, to assess therapeutic efficacy and treatment.

b. Rheumatoid Arthritis Synovial Membrane Mononuclear Cell Cultures

[0840] Human rheumatoid arthritis (RA) synovial membrane mononuclear cells (MNCs), which express TNFR1 and TNFR2, also can be used to test the therapeutic efficacy of the constructs provided herein. The RA synovial membrane MNCs can be obtained from RA patients undergoing joint replacement surgery, and cultured ex vivo to evaluate RA synovial cell cytokine production and regulation. RA synovial membrane MNC cultures produce inflammatory cytokines and chemokines spontaneously, in the absence of exogenous stimulation; antibody-mediated neutralization of TNF, and the selective blockade of TNFR1, such as by constructs provided herein, in these cultures inhibits the production of proinflammatory cytokines and chemokines, such as GM-CSF, IL-10, IL-1β, IL-6, IL-8, RANTES (CCL5) and MCP-1 (CCL2).

[0841] In an exemplary assay, to prepare the RA synovial membrane MNCs, RA synovial membrane tissues are dissected into small pieces, incubated for 1 hour at 37° C. with 5 mg/ml collagenase A and 0.15 mg/ml DNase in RPMI 1640, after which the digested tissue is passed through a 170 μm filter and washed 3 times with RPMI 1640 containing 100 units/ml of streptomycin, 100 μg of penicillin, and 10% FCS.

[0842] Heterogeneous RA synovial membrane MNCs then are used without passage. For ex vivo cell culture, single-cell suspensions of RA synovial membrane MNCs are cultured in RPMI 1640 medium with 5% FCS in 96-well flat-bottomed plates (2×10⁵ cells/well) for 2-5 days at 37° C. and 5% CO₂, in the presence or absence of the TNFR1 antagonistic, TNFR2 agonistic, or bispecific constructs, or control. The supernatant then is collected and used immediately, or stored at −20° C., for analysis by cytokine and chemokine ELISAs (see, e.g., Schmidt et al. (2013) Arthritis & Rheumatism 65(9):2262-2273). Alternatively, the cytokines in culture supernatants can be quantified by cytokine bead array analysis.

c. Tg197 Mouse Model of Arthritis

[0843] The Tg197 transgenic strain of mice, a mouse model of erosive arthritis, is a well-established animal model of RA. Tg197 mice are human TNF-transgenic C57BL/6 mice that overexpress human TNF and develop a symmetric polyarthritis with pannus formation, bone destruction, and cartilage damage that is characteristic of human RA. In addition to displaying features of chronic destructive joint disease, this model exhibits symptoms, such as enthesitis or bilateral sacroiliitis, which are characteristic of other inflammatory diseases, such as spondyloarthritis (Blüml et al. (2010) Arthritis & Rheumatism 62(6):1608-1619). Tg197 mice develop arthritis with 100% penetrance and provide a fast in vivo model for evaluating human therapeutics that target RA. For example, the Tg197 mouse model was used to evaluate the therapeutic efficacy of infliximab (originally sold as Remicade®), the first anti-TNF therapeutic successfully applied in the clinic, and is recommended by the FDA for screening potential anti-RA therapeutics.

[0844] Tg197 mice carry five copies of a human TNF gene construct, in which the 3′-region, containing the 3′-untranslated and 3′-flanking sequences, is exchanged with the 3′-region of the human P-globin gene. This gene construct is microinjected into mouse zygotes, creating an in vivo model of deregulated TNF gene expression, since a set of highly conserved UA-rich sequences at the 3′-untranslated region of TNF mRNA is critical for the regulation of mRNA stability and translation efficiency (see, e.g., Keffer et al. (1991) EMBO J. 10(13):4025-4031).

### d. ΔΔRE Mouse Model of Arthritis/IBD

[0845] Mice with a deletion in the 3′ AU-rich elements (AREs) of the TNF mRNA (Tnf^{ΔARE}) overproduce TNF and develop an inflammatory bowel disease that is histopathologically similar to Crohn's disease, at between 4-8 weeks of age. The mice also develop clinical signs of RA. The efficacy of the TNFR1 antagonists, TNFR2 agonists, and bispecific constructs, provided herein, can be evaluated by assessing the inhibitory effects on the Crohn's-like pathology and arthritis in Tnf^{ΔARE} mice following intraperitoneal injection (see, e.g., U.S. Pat. No. 9,028,822).

e. Humanized TNF/TNFR2 Mice

[0846] A limitation in the development of therapeutics targeting the TNF/TNFR2 signaling pathway is the lack of preclinical animal models, as many human anti-TNF therapeutics do not interact with murine TNF or TNFR2, and human TNF can bind to and engage murine TNFR1, but not TNFNR2. Humanized TNF/TNFR2 mice, which carry a functional human TNF-TNFR2 (hTNF-hTNFR2) signaling module, can be used to evaluate therapeutics, such as agonistic and antagonistic antibodies constructs human TNF or human TNFR2, in various models of autoimmunity. Such TNF/TNFR2 doubly humanized mice can be used, for example, to evaluate the TNFR2 agonist constructs provided herein.

[0847] Humanized TNF/TNFR2 mice can be generated as described in Atretkhany et al. (2018) Proc. Natl. Acad. Sci. U.S.A. 115(51):13051-13056. Briefly, human TNFR2 knock-in (hTNFR2KI) and human TNF knock-in (hTNFKI) mice are generated using standard genetic engineering techniques. The hTNFKI mice, in which the human TNF gene has replaced the mouse TNF gene, then are crossed with the hTNFR2KI mice, containing a humanized TNFR2 ligand-binding portion, and then intercrossed to generate doubly humanized double homozygous hTNFKI×hTNFR2KI mice. To assess the role of TNFR2 signaling in particular cells, e.g., Tregs, two LoxP sites are inserted within the hTNFR2 locus, to allow for the conditional Cre-mediated ablation of the extracellular portion of TNFR2. For Treg-specific deletion of TNFR2, these mice are crossed with FoxP3-Cre transgenic mice (see, e.g., Atretkhany et al. (2018) Proc. Natl. Acad. Sci. U.S.A. 115(51):13051-13056).

### H. Methods of Producing Nucleic Acids Encoding Tnfr1 Antagonist Constructs and Tnfr1 Antagonist/Tnfr2 Agonist Constructs

[0848] TNFR1 antagonist polypeptides, TNFR2 agonist polypeptides, and TNFR1 antagonist/TNFR2 agonist polypeptide constructs, provided herein, that are polypeptides can be obtained by methods well known in the art for protein purification and recombinant protein expression, and also for recombinant antibody preparation. Constructs provided herein that include portions, such as linkers, that are not polypeptides can be prepared by chemical conjugation methods as appropriate. The polypeptide portions can be produced by standard recombinant technology, such as by expression in a suitable host (bacterial if no glycosylation is desired, or in eukaryotic cells, such as HEK293 and CHO cells, if glycosylated forms are desired). Active antibodies and antibody fragments have been produced in E. coli, but these often have aggregation and solubility problems because of improper folding, which can be remedied by further mutagenesis of the coding sequences (see, e.g., Kunz et al. (2018) Sci Rep. 8(1):7934).

[0849] Polypeptides also can be synthesized chemically. Fusion polypeptides can be synthesized by standard methods of recombinant production. The components, discussed above, of the various constructs can be separately synthesized, and combined using standard methods to produce the constructs.

[0850] Nucleic acid encoding the polypeptide constructs or polypeptide portions thereof, including modified or variant, including truncated forms, can be prepared from nucleic acid. Modified or variant polypeptides can be engineered from nucleic acid encoding wild type polypeptides using standard recombinant DNA methods. For example, modified TNF polypeptides, such as the TNF muteins, that selectively bind to TNFR1 or TNFR2, and/or that selectively antagonize TNFR1 or selectively agonize TNFR2, can be engineered from wild type TNF, such as by site-directed mutagenesis of the encoding DNA. Any methods known to those of skill in the art can be used. The following discussion and description in the Examples is exemplary.

### 1. Isolation or Preparation of Nucleic Acids Encoding TNFR1 Antagonist and TNFR2 Agonist Polypeptides

[0851] Nucleic acids encoding TNFR1 antagonist polypeptides, TNFR2 agonist polypeptides, and TNFR1 antagonist/TNFR2 agonist polypeptide constructs can be cloned or isolated using any available methods known in the art for cloning and isolating nucleic acid molecules. Such methods include polymerase chain reaction (PCR) amplification of nucleic acids and screening of libraries, including nucleic acid hybridization screening, antibody-based screening and activity-based screening. For example, when the polypeptides are produced by recombinant means, any method known to those of skill in the art for identification of nucleic acids that encode desired polypeptides can be used.

[0852] Nucleic acid molecules encoding the polypeptides herein can be synthetically produced, or can readily be isolated and sequenced, as needed, using conventional procedures (e.g., by using oligonucleotide probes that are capable of binding specifically to genes encoding the heavy and/or light chains of the antibody fragments, such as, e.g., single domain antibodies (dAbs), scFv fragments, and Fab antibody fragments). For example, any cell source known to produce or express a TNFR1 antagonist or TNFR2 agonist antibody or fragment(s) thereof can serve as a source of such DNA. In another example, once the sequence of the DNA encoding the TNFR1 antagonist or TNFR2 agonist antibody or fragment(s) thereof is determined, nucleic acid sequences can be constructed using gene synthesis techniques.

[0853] Methods for amplification of nucleic acids can be used to isolate nucleic acid molecules encoding a desired polypeptide, including for example, polymerase chain reaction (PCR) methods. Exemplary of such methods include use of a Perkin-Elmer Cetus thermal cycler and Taq polymerase (Gene Amp). A nucleic acid containing material can be used as a starting material from which a desired polypeptide-encoding nucleic acid molecule can be isolated. For example, DNA and mRNA preparations, cell extracts, tissue extracts, fluid samples (e.g., blood, serum, and saliva), and samples from healthy and/or diseased subjects can be used in amplification methods. The source, which generally will be from human sources, can be, if appropriate from any eukaryotic species including, but not limited to, vertebrate, mammalian, human, porcine, bovine, feline, avian, equine, canine, and other primate sources. Nucleic acid libraries also can be used as a source of starting material. Primers can be designed to amplify a desired polypeptide. For example, primers can be designed based on expressed sequences from which a desired polypeptide is generated. Primers can be designed based on back-translation of a polypeptide amino acid sequence. If desired, degenerate primers can be used for amplification. Oligonucleotide primers that hybridize to sequences at the 3′ and 5′ termini of the desired sequence can be used as primers to amplify sequences by PCR from a nucleic acid sample. Primers can be used to amplify the entire full-length polypeptide, or a truncated sequence thereof, such as a nucleic acid encoding any of the TNFR1 antagonist and TNFR1 agonist polypeptides, as well as the TNFR1 antagonist/TNFR2 agonist polypeptide constructs, provided herein. Nucleic acid molecules generated by amplification can be sequenced and confirmed to encode the desired polypeptide or construct.

[0854] Mutagenesis techniques can be employed to generate further modified forms of a TNFR1 antagonist or TNFR2 agonist antibody or fragment(s) thereof and to produce modified forms of the activity modifier, such as Fc and hinge regions, and linker portions. The DNA also can be modified. For example, gene synthesis and routine molecular biology techniques can be used to effect insertion, deletion, addition or replacement/substitution of nucleotides. Additional nucleotide sequences can be joined to a polypeptide-encoding nucleic acid molecule, including linker sequences containing restriction endonuclease sites for the purpose of cloning the synthetic gene into a vector, for example, a protein expression vector or a vector designed for the amplification of the core polypeptide-coding DNA sequences. Additional nucleotide sequences specifying functional DNA elements, such as promoters, enhancers, and IRES sequences, can be operatively linked to a polypeptide-encoding nucleic acid molecule. Examples of such sequences include, but are not limited to, promoter sequences designed to facilitate intracellular protein expression, and secretion sequences, for example heterologous signal sequences, designed to facilitate protein secretion. Such sequences are known to those of skill in the art. Additional nucleotide sequences, such as sequences specifying protein binding regions, also can be linked polypeptide-encoding nucleic acid molecules. Such regions include, but are not limited to, sequences that facilitate uptake of a polypeptide into specific target cells, or that otherwise alter or enhance the pharmacokinetics of the product of a synthetic gene.

[0855] Tags and/or other moieties can be added, for example, to aid in detection or affinity purification of the polypeptide. For example, additional nucleotide sequences, such as sequences of bases specifying an epitope tag or other detectable marker, also can be linked to polypeptide-encoding nucleic acid molecules. Exemplary of such sequences include nucleic acid sequences encoding a SUMO tag, or His tag, or Flag Tag.

[0856] It is understood that any of the amino acid sequences provided herein can be reverse-translated (also called back translated), using standard methods commonly used by those skilled in the art, to generate corresponding encoding nucleic acid sequences, which can be cloned into vectors and expressed to generate the constructs, including polypeptides, antibodies and antibody fragments, provided herein. For example, there are several online tools are available to convert protein sequences to encoding DNA sequences, such as bioinformatics.org/sms2/rev_trans.html; biophp.org/minitools/protein_to_dna/demo.php; vivo.colostate.edu/molkit/rtranslate/; ebi.ac.uk/Tools/st/emboss_backtranseq/; molbiol.ru/eng/scripts/01_19.html; and geneinfinity.org/sms/sms_backtranslation.html. Such reverse translated sequences can be inserted into any of the expression vectors provided herein for the expression and production of the provided antibodies or fragments. Anti-TFR1 and anti-TNFR2 antibodies, such as the TNFR1 antagonist and TNFR2 agonist constructs can be expressed as full-length proteins or less than full length proteins. For example, antibody fragments, such as, but not limited to, single domain antibodies (dAbs), scFv fragments, and Fab fragments, can be expressed.

[0857] The identified and isolated nucleic acids then can be inserted into an appropriate cloning vector. A large number of vector-host systems known in the art can be used. Possible vectors include, but are not limited to, plasmids or modified viruses, but the vector system must be compatible with the host cell used. Such vectors include, but are not limited to, bacteriophages such as lambda derivatives, or plasmids such as pCMV4, pBR322 or pUC plasmid derivatives or the pBluescript vector (Stratagene, La Jolla, CA). The insertion into a cloning vector can, for example, be accomplished by ligating the DNA fragment into a cloning vector which has complementary cohesive termini. Insertion can be effected using TOPO cloning vectors (Invitrogen, Carlsbad, CA).

[0858] If the complementary restriction sites used to fragment the DNA are not present in the cloning vector, the ends of the DNA molecules can be enzymatically modified. Alternatively, any site desired can be produced by ligating nucleotide sequences (linkers) onto the DNA termini; these ligated linkers can contain specific chemically synthesized oligonucleotides encoding restriction endonuclease recognition sequences. In an alternative method, the cleaved vector and polypeptide gene can be modified by homopolymeric tailing.

[0859] Recombinant molecules can be introduced into host cells via, for example, transformation, transfection, infection, electroporation and sonoporation, so that many copies of the gene sequence are generated. In specific embodiments, transformation of host cells with recombinant DNA molecules that incorporate the isolated polypeptide gene, cDNA, or synthesized DNA sequence, enables generation of multiple copies of the gene. Thus, the gene can be obtained in large quantities by growing transformants, isolating the recombinant DNA molecules from the transformants and, when necessary, retrieving the inserted gene from the isolated recombinant DNA.

[0860] For expression of antibodies and fragments thereof, generally, a nucleic acid molecule encoding the heavy chain of an antibody is cloned into a vector, and a nucleic acid molecule encoding the light chain of an antibody is cloned into a vector. Methods for production of antibodies and portions thereof are well known (see, e.g., U.S. Pat. Nos. 4,816,567, 6,331,415, and 7,923,221, and numerous other seminal patents). The genes can be cloned into a single vector for dual expression thereof, or into separate vectors. If desired, the vectors also can contain further sequences encoding additional constant region(s) or hinge regions to generate other antibody forms. The vectors can be transfected and expressed in host cells. Expression can be in any cell expression system known to one of skill in the art. For example, host cells include cells that do not otherwise produce immunoglobulin protein, to obtain the synthesis of antibodies in the recombinant host cells. For example, host cells include, but are not limited to, simian COS cells, Chinese hamster ovary (CHO) cells, such as for example, CHO-DG44 (DHFR⁻) and FreeStyle™ CHO-S cells, Invitrogen), 293FS cells, HEK293 cells, NSO cells or other myeloma cells. Other expression vectors and host cells are described herein.

[0861] The constructs provided herein, including the TNFR1 antagonists, TNFR2 agonists and TNFR1 antagonist/TNFR2 agonist constructs, can be generated or expressed as full-length constructs or less than full-length, including, but not limited to, antigen-binding fragments, such as, for example, single domain antibody (dAb), Fab, Fab′, Fab hinge, F(ab′)₂, single-chain Fv (scFv), scFv tandem, Fv, dsFv, scFv hinge, scFv hinge (AE), diabody, Fd and Fd′ fragments. There are various techniques for the production of antibody fragments. For example, fragments can be derived via proteolytic digestion of intact antibodies (see, e.g., Morimoto and Inouye (1992) Journal of Biochemical and Biophysical Methods 24:107-117; Brennan et al. (1985) Science 229:81-83). Fragments also can be produced directly by recombinant host cells. For example, dAb, Fab, Fv and scFv antibody fragments can all be expressed in and secreted from host cells, such as E. coli, CHO cells or HEK293 cells, thereby facilitating production of large amounts of these fragments. F(ab′)₂ fragments can be produced by chemically coupling Fab′-SH fragments (see, e.g., Carter et al. (1992) Bio Technology, 10:163-167), or they can be isolated directly from recombinant host cell cultures. In some examples, the TNFR1 antagonist constructs include a single domain antibody (dAb; described, for example, in International Application Publication Nos. WO 2004/058820, WO 2004/081026, WO 2005/035572, WO 2006/038027, WO 2007/049017, WO 2008/149144, WO 2008/149148, WO 2010/094720, WO 2011/006914, WO 2011/051217, WO 2012/172070, WO 2012/104322, and WO 2015/104322; Enever et al., (2015) Protein Engineering, Design & Selection 28(3):59-66, U.S. Application Publication Nos. 2006/0083747, 2010/0034831, and 2012/0107330; and U.S. Pat. Nos. 9,028,817 and 9,028,822), a single-chain Fv fragment (scFv) (see, e.g., International Application Publication Nos. WO 2017/174586, and WO 2008/113515; see, also, Richter, F. Thesis, entitled “Evolution of the Antagonistic Tumor Necrosis Factor Receptor One-Specific Antibody ATROSAB,” Universitat Stuttgart, 2015; available from pdfs.semanticscholar.org/d8e7/8b87d76dce36225cid497939ef37445cfa8a.pdf), or a Fab fragment (see, e.g., International Application Publication Nos. WO 2017/174586 and WO 2008/113515; see, also, Richter, F. Thesis, entitled “Evolution of the Antagonistic Tumor Necrosis Factor Receptor One-Specific Antibody ATROSAB,” Universität Stuttgart, 2015; available from pdfs.semanticscholar.org/d8e7/8b87d76dce36225c1d497939ef37445cfa8a.pdf). dAb, Fv and scFv fragments have intact combining sites but are devoid of constant regions; thus, they are suitable for reduced non-specific binding during in vivo use. dAb and scFv fusion proteins can be constructed to attach an effector protein (e.g., an IgG Fc) at either the amino- or the carboxy-terminus of a dAb or scFv. The antibody fragment can also be a linear antibody (see, e.g., U.S. Pat. No. 5,641,870). Such linear antibody fragments can be monospecific or bispecific. Other techniques for the production of antibody fragments are known to one of skill in the art.

[0862] Upon expression, antibody heavy and light chains, or fragment(s) thereof, pair by interchain disulfide bonds to form a full-length antibody or fragment thereof. For example, for expression of a full-length Ig, sequences encoding the V_{H}-C_{H}1-hinge-C_{H}2-C_{H}3 can be cloned into a first expression vector, and sequences encoding the V_{L}-C_{L} domains can be cloned into a second expression vector. Upon co-expression, the full-length heavy and light chains are interlinked by disulfide bonds to generate a full-length antibody. In another example, to generate a Fab, sequences encoding a fragment containing the V_{H} and C_{H}1 regions can be cloned into a first expression vector, and sequences encoding the V_{L}-C_{L} domains can be cloned into a second expression vector. Upon co-expression, the heavy chain pairs with a light chain to generate a Fab monomer. Sequences of C_{H}I, hinge, C_{H}2 and/or C_{H}3 regions of various IgG sub-types are known to one of skill in the art (see, e.g., U.S. Publication No. 2008/0248028; see, also, SEQ ID NOs: 9, 11, 13, and 15). Similarly, sequences of C_{L}, lambda or kappa, also are known (see, e.g., U.S. Publication No. 2008/0248028; see, also, SEQ ID NOS: 17-22).

[0863] In addition to recombinant production, TNFR1 antagonist polypeptides, TNFR2 agonist polypeptides, and TNFR1 antagonist/TNFR2 agonist polypeptide constructs, provided herein, can be produced by direct peptide synthesis using well-known solid-phase techniques. In vitro protein synthesis can be performed using manual techniques or by automation. Automated synthesis can be achieved, for example, using the Applied Biosystems 431A Peptide Synthesizer (Perkin Elmer; Foster City, CA), in accordance with the instructions provided by the manufacturer. Various fragments of a polypeptide can be chemically synthesized separately and combined using chemical methods.

### 2. Generation of Mutant or Modified Nucleic Acids and Encoding Polypeptides

[0864] The modifications provided herein can be made by standard recombinant DNA techniques, such as are routine to one of skill in the art. Any method known in the art to effect mutation of any one or more amino acids in a target protein or polypeptide can be employed. Methods include standard site-directed mutagenesis (using, e.g., a kit, such as the QuikChange kit available from Stratagene) of encoding nucleic acid molecules, or solid-phase polypeptide synthesis methods.

### 3. Vectors and Cells

[0865] For recombinant expression of one or more of the desired polypeptides, such as any TNFR1 antagonist or TNFR2 agonist polypeptides, or TNFR1 antagonist/TNFR2 agonist polypeptide constructs, described herein, the nucleic acid molecule containing all or a portion of the nucleotide sequence encoding the polypeptide can be inserted into an appropriate expression vector, i.e., a vector that contains the necessary elements for the transcription and translation of the inserted polypeptide coding sequence. Also provided are vectors that contain nucleic acid molecules encoding the polypeptides. After insertion of the nucleic acid molecule(s), the vectors typically are used to transform host cells, for example, to amplify the nucleic acid for replication and/or expression thereof. In such examples, a vector suitable for high level expression is used. In other cases, a vector is chosen that is compatible with display of the expressed polypeptide on the surface of the cell The choice of vector can depend on the desired application. Many expression vectors are available and known to those of skill in the art for the expression of anti-TNFR1 and anti-TNFR2 antibodies or portions thereof, such as antigen-binding fragments. Such selection is well within the level of skill of the skilled artisan. In general, expression vectors can include transcriptional promoters and optionally enhancers, translational signals, and transcriptional and translational termination signals. Expression vectors that are used for stable transformation typically have a selectable marker which allows for selection and maintenance of the transformed cells. In some cases, a high copy number origin of replication can be used to amplify the copy number of the vectors in the cells. Vectors also generally can contain additional nucleotide sequences operably linked to the ligated nucleic acid molecule (e.g., His tag, Flag tag). For applications with antibodies, vectors generally include sequences encoding the constant region. Thus, antibodies or portions thereof also can be expressed as protein fusions. For example, a fusion protein can be generated to add additional functionality to a polypeptide. Examples of fusion proteins include, but are not limited to, fusions of a signal sequence, an epitope tag such as for localization, e.g., a His₆ tag or a myc tag, or a tag for purification, such as a GST tag, and/or a sequence for directing protein secretion and/or membrane association. Fusion proteins herein also include fusions of the TNFR1 antagonist and/or the TNFR2 agonist to a modified Fc region, the hinge region of an IgG, and/or a peptide linker, such as a GS linker.

[0866] A variety of host-vector systems can be used to express the protein coding sequence. These include, but are not limited to, mammalian cell systems infected with virus (e.g., vaccinia virus, adenovirus, and other viruses); insect cell systems infected with virus (e.g., baculovirus); microorganisms, such as yeast, containing yeast vectors; and bacteria transformed with bacteriophage, DNA, plasmid DNA, or cosmid DNA. The choice between eukaryotic expression systems and bacterial systems depends upon the desired post-translational modifications, such as glycosylation. The expression elements of vectors vary in their strengths and specificities. Depending on the host-vector system used, any one of a number of suitable transcription and translation elements can be used.

[0867] Any methods known to those of skill in the art for the insertion of DNA fragments into a vector can be used to construct expression vectors containing a nucleic acid molecule encoding a polypeptide, such as, for example, an antibody fragment or TNFR1 antagonist, or TNFR2 agonist, provided herein, as well as appropriate transcriptional/translational control signals. These methods can include in vitro recombinant DNA and synthetic techniques, and in vivo recombinants (genetic recombination). The insertion into a cloning vector can, for example, be accomplished by ligating the DNA fragment into a cloning vector which has complementary cohesive termini. If the complementary restriction sites used to fragment the DNA are not present in the cloning vector, the ends of the DNA molecules can be enzymatically modified. Alternatively, any site desired can be produced by ligating nucleotide sequences (linkers) onto the DNA termini; these ligated linkers can contain specific chemically synthesized nucleic acids encoding restriction endonuclease recognition sequences.

[0868] For example, expression of the construct polypeptides, such as the TNFR1 antagonists, TNFR2 agonists and TNFR1 antagonist/TNFR2 agonist constructs herein, can be controlled by any promoter/enhancer known in the art. Suitable bacterial promoters are well-known in the art and described herein below. Other suitable promoters for mammalian cells, yeast cells and insect cells are well-known in the art and some are exemplified below. Selection of the promoter used to direct expression of a heterologous nucleic acid depends on the particular application.

[0869] Promoters which can be used include, but are not limited to, eukaryotic expression vectors containing the SV40 early promoter (see, e.g., Benoist and Chambon (1981) Nature 290:304-310), the promoter contained in the 3′ long terminal repeat of Rous sarcoma virus (see, e.g., Yamamoto et al. (1980) Cell 22:787-797), the herpes thymidine kinase promoter (see, e.g., Wagner et al. (1981) Proc. Natl. Acad. Sci. U.S.A. 78:1441-1445), the regulatory sequences of the metallothionein gene (see, e.g., Brinster et al. (1982) Nature 296:39-42), and the cytomegalovirus (CMV) promoter; prokaryotic expression vectors such as the β-lactamase promoter (see, e.g., Jay et al. (1981) Proc. Natl. Acad. Sci. U.S.A. 78:5543), or the tac promoter (see, e.g., DeBoer et al. (1983) Proc. Natl. Acad. Sci. U.S.A. 80:21-25); see also “Useful Proteins from Recombinant Bacteria”: in Scientific American 242:79-94 (1980); plant expression vectors containing the nopaline synthetase promoter (see, e.g., Herrara-Estrella et al. (1984) Nature 303:209-213), the cauliflower mosaic virus 35S RNA promoter (see, e.g., Gardner et al. (1981) Nucleic Acids Res. 9(12):2871-2888), and the promoter of the photosynthetic enzyme ribulose bisphosphate carboxylase (see, e.g., Herrera-Estrella et al. (1984) Nature 310:115-120); promoter elements from yeast and other fungi such as the Gal4 promoter, the alcohol dehydrogenase promoter, the phosphoglycerol kinase promoter, the alkaline phosphatase promoter, and the following animal transcriptional control regions that exhibit tissue specificity and have been used in transgenic animals: elastase I gene control region, which is active in pancreatic acinar cells (see, e.g., Swift et al. (1984) Cell 38:639-646; Ornitz et al. (1986) Cold Spring Harbor Symp. Quant. Biol. 50:399-409; MacDonald (1987) Hepatology 7:425-515), insulin gene control region, which is active in pancreatic beta cells (see, e.g., Hanahan et al. (1985) Nature 315:115-122), immunoglobulin gene control region, which is active in lymphoid cells (see, e.g., Grosschedl et al. (1984) Cell 38:647-658; Adams et al. (1985) Nature 318:533-538; Alexander et al. (1987) Mol. Cell Biol. 7:1436-1444), mouse mammary tumor virus control region, which is active in testicular, breast, lymphoid and mast cells (see, e.g., Leder et al. (1986) Cell 45:485-495), albumin gene control region, which is active in liver (see, e.g., Pinckert et al. (1987) Genes and Devel. 1:268-276), alpha-fetoprotein gene control region, which is active in liver (see, e.g., Krumlauf et al. (1985) Mol. Cell. Biol. 5:1639-1648; Hammer et al. (1987) Science 235:53-58), alpha-1 antitrypsin gene control region, which is active in liver (see, e.g., Kelsey et al. (1987) Genes and Devel. 1:161-171), beta globin gene control region, which is active in myeloid cells (see, e.g., Magram et al. (1985) Nature 315:338-340; Kollias et al. (1986) Cell 46:89-94), myelin basic protein gene control region, which is active in oligodendrocyte cells of the brain (see, e.g., Readhead et al. (1987) Cell 48:703-712), myosin light chain-2 gene control region, which is active in skeletal muscle (see, e.g., Shani (1985) Nature 314:283-286), and gonadotrophic releasing hormone gene control region, which is active in gonadotrophs of the hypothalamus (see, e.g., Mason et al. (1986) Science 234:1372-1378).

[0870] Expression vectors typically contain a transcription unit or expression cassette that contains all the additional elements required for the expression of the construct or portion(s) thereof, in host cells. A typical expression cassette contains a promoter operably linked to the nucleic acid encoding the construct, such as an antibody fragment, domain, derivative or homolog thereof, or other polypeptide as described herein (e.g., TNF muteins and fusion proteins), and signals required for efficient polyadenylation of the transcript, ribosome binding sites and translation termination. Additional elements of the cassette can include enhancers. In addition, the cassette typically contains a transcription termination region downstream of the structural gene to provide for efficient termination. The termination region can be obtained from the same gene as the promoter sequence, or can be obtained from different genes. For example, a vectors include, a promoter operably linked to nucleic acids encoding a desired polypeptide, or a domain, fragment, derivative or homolog hereof, one or more origins of replication, and optionally, one or more selectable markers (e.g., an antibiotic resistance gene).

[0871] Expression systems can have markers that provide gene amplification, such as thymidine kinase and dihydrofolate reductase. Expression systems not involving gene amplification are also suitable, such as using a baculovirus vector in insect cells, with a nucleic acid sequence encoding a polypeptide under the direction of the polyhedron promoter or other strong baculovirus promoter.

[0872] For purposes herein, vectors are provided that contain a sequence of nucleotides that encode the Fc region of an IgG antibody, generally a modified Fc, operably linked to the nucleic acid encoding a TNFR1 antagonist or TNFR2 agonist polypeptide, and encoding a linker in between, such as an IgG hinge sequence and/or a short peptide linker, such as a GS linker, including glycine rich flexible linkers, such as (Gly₄Ser)ₙ, where n is a positive integer, such as 1-5 or more, and others of the linkers as described herein or known to those of skill in the art. The vector can include the sequence for one or all of a C_{H}1, C_{H}2, hinge, C_{H}3 or C_{H}4, and/or C_{L}. Generally, such as for expression of Fabs, the vector contains the sequence for a C_{H}1 or C_{L} (kappa or lambda light chains). For example, V_{H}-C_{H}1 and V_{L}-C_{L} sequences can be inserted into a suitable expression vector for the expression of Fab molecules. The sequences of constant regions or hinge regions are known to one of skill in the art (see. e.g., U.S. Publication No. 2008/0248028). Examples of such sequences are provided herein.

[0873] Typically, vectors can be plasmids, viral vectors, or others known in the art, used for expression of the polypeptides in vivo or in vitro. For example, the constructs provided herein, such nucleic acid encoding TNFR1 antagonist and TNFR2 agonist polypeptide constructs, are expressed in mammalian cells, including, for example, Chinese Hamster Ovary (CHO) cells.

[0874] Exemplary eukaryotic vectors include, for example, well known readily available vectors, such as pCMV (Agilent Technologies), pCDNA3.1 (Invitrogen (Thermo Fisher Scientific)), pCBL (from Creative BioLabs, see, e.g., FIG. 1). Other eukaryotic vectors, for example any containing regulatory elements from eukaryotic viruses, can be used as eukaryotic expression vectors. These include, for example, SV40 vectors, papilloma virus vectors, and vectors derived from Epstein-Bar virus. Exemplary eukaryotic vectors include, for example, pMSG, pAV009/A+, pMT010/A+, pMAMneo-5, baculovirus pDSCE, and any other vector allowing for the expression of proteins under the direction of the CMV promoter, SV40 early promoter, SV40 late promoter, metallothionein promoter, murine mammary tumor virus promoter, Rous sarcoma virus promoter, polyhedron promoter, or other promoters shown to be effective for expression in eukaryotes.

[0875] Viral vectors, such as adenovirus, retrovirus or vaccinia virus vectors, can be employed. In some examples, the vector is a defective or attenuated retroviral or other viral vector (see, e.g., U.S. Pat. No. 4,980,286). For example, a retroviral vector can be used (see, e.g., Miller et al. (1993) Meth. Enzymol. 217:581-599). These retroviral vectors have been modified to delete retroviral sequences that are not necessary for packaging of the viral genome and integration into host cell DNA. In some examples, viruses armed with a nucleic acid encoding a polypeptide herein can facilitate their replication and spread within a target tissue. The virus also can be a lytic virus or a non-lytic virus where the virus selectively replicates under a tissue specific promoter. As the viruses replicate, the co-expression of the polypeptide with viral genes will facilitate the spread of the virus in vivo.

[0876] For bacterial expression, vectors include the well-known and widely disseminated vectors pBR322, pUC, pSKF, pET23D, and fusion vectors, such as MBP (Sigma-Aldrich), GST (Sigma-Aldrich) and vectors containing LacZ. Exemplary plasmid vectors for transformation of E. coli cells, include, for example, the pQE expression vectors (available from Qiagen®, Valencia, CA; see also literature published by Qiagen® describing the system). pQE vectors have a phage T5 promoter (recognized by E. coli RNA polymerase) and a double lac operator repression module to provide tightly regulated, high-level expression of recombinant proteins in E. coli, a synthetic ribosomal binding site (RBS II) for efficient translation, a 6×His tag coding sequence, to and T1 transcriptional terminators, a ColE1 origin of replication, and a beta-lactamase gene for conferring ampicillin resistance. The pQE vectors permit placement of a 6×His tag at either the N- or C-terminus of the recombinant protein. Such plasmids include pQE 32, pQE 30, and pQE 31, which provide multiple cloning sites for all three reading frames and provide for the expression of N-terminally 6×His-tagged proteins. Other exemplary plasmid vectors for transformation of E. coli cells, include, for example, the pET expression vectors (see, e.g., U.S. Pat. No. 4,952,496; available from NOVAGEN, Madison, WI; see, also literature published by NOVAGEN describing the system). Such plasmids include pET 11a, which contains the T71ac promoter, the T7 terminator, the inducible E. coli lac operator, and the lac repressor gene; pET 12a-c, which contains the T7 promoter, the T7 terminator, and the E. coli ompT secretion signal; and pET 15b and pET19b (NOVAGEN, Madison, WI), which contain a His-Tag™ leader sequence for use in purification with a His column, and a thrombin cleavage site that permits cleavage following purification over the column, the T7-lac promoter region and the T7 terminator.

[0877] Cells containing the vectors also are provided. Generally, any cell type that can be engineered to express heterologous DNA and has a secretory pathway is suitable. The cells include eukaryotic and prokaryotic cells, and the vectors are any suitable for use therein. Generally, the cell is a cell that is capable of effecting glycosylation of the encoded protein. Prokaryotic and eukaryotic cells containing the vectors are provided. Such cells include bacterial cells, yeast cells, fungal cells, Archea, plant cells, insect cells and animal, particularly mammalian, cells. The cells are used to produce a polypeptide by growing the above-described cells under conditions whereby the encoded polypeptide is expressed by the cell, and recovering the expressed polypeptide. For purposes herein, for example, the polypeptide can be secreted into the medium.

[0878] A host cell strain can be chosen for its ability to modulate the expression of the inserted sequences or to process the expressed protein in the desired fashion. Such modifications of the polypeptide include, but are not limited to, acetylation, carboxylation, glycosylation, phosphorylation, lipidation and acylation. Post-translational processing can impact the folding and/or function of the polypeptide. Different host cells, such as, but not limited to, Chinese hamster ovary (CHO) cells, such as DG44, FreeStyle™ CHO-S cells (Invitrogen), DXB11, CHO-K1), HeLa, MCDK, HEK293 and WI38 cells, have specific cellular machinery and characteristic mechanisms for such post-translational activities, and can be chosen to ensure the correct modification and processing of the introduced protein. Generally, the choice of cell is one that is capable of introducing N-linked glycosylation into the expressed polypeptide. Hence, eukaryotic cells containing the vectors are provided. Exemplary of eukaryotic cells are mammalian Chinese Hamster Ovary (CHO) cells. For example, CHO cells deficient in dihydrofolate reductase (DHFR-), such as DG44 cells, are used to produce polypeptides provided herein.

### 4. Expression

[0879] The polypeptide constructs provided herein, including TNFR1 antagonist constructs, TNFR2 agonist constructs, TNFR1 antagonist/TNFR2 agonist multi-specific constructs, and portions thereof, can be produced by any method known to those of skill in the art for protein production, including in vivo and in vitro methods, recombinant and synthetic and chemical methods. Desired proteins can be expressed in any organism suitable to produce the required amounts and forms of the proteins, such as for example, needed for administration and treatment. Expression hosts include prokaryotic and eukaryotic organisms such as E. coli, yeast, plants, insect cells, mammalian cells, including human cell lines and transgenic animals. Expression hosts can differ in their protein production levels as well as the types of post-translational modifications that are present on the expressed proteins. The choice of expression host can be made based on these and other factors, known to those of skill in the art; these include regulatory and safety considerations, production costs and the need and methods for purification. Purification methods, and methods for assembly of components, are well known to those of skill in the art.

[0880] Expression in eukaryotic hosts can include expression in yeasts, such as Saccharomyces cerevisiae and Pichia pastoris, insect cells, such as Drosophila cells and lepidopteran cells, plants and plant cells, such as tobacco, corn, rice, algae, and lemna. Eukaryotic cells for expression also include mammalian cells lines, such as Chinese hamster ovary (CHO) cells, human embryonic kidney (HEK293) cells, or baby hamster kidney (BHK) cells. Eukaryotic expression hosts also include production in transgenic animals, for example, including production in serum, milk and eggs.

[0881] Many expression vectors are available and known to those of skill in the art and can be used for expression of proteins. The choice of expression vector will be influenced by the choice of host expression system. In general, expression vectors can include transcriptional promoters and optionally enhancers, translational signals, and transcriptional and translational termination signals. Expression vectors that are used for stable transformation typically have a selectable marker which allows selection and maintenance of the transformed cells. In some cases, an origin of replication can be used to amplify the copy number of the vectors in the cells.

[0882] The TNFR1 antagonists, TNFR2 agonists and bi-specific TNFR1 antagonist/TNFR2 agonist constructs herein also can be expressed as protein fusions. For example, a fusion protein can be generated to add additional functionality to a polypeptide. Examples of fusion proteins include, but are not limited to, fusions of a signal sequence, a tag such as for localization, e.g., a his₆ tag or a myc tag, or a tag for purification, for example, a GST fusion, and a sequence for directing protein secretion and/or membrane association. Fusion proteins also include fusions with an Fc region of an IgG, and a linker, such as a hinge sequence of an IgG, and/or a glycine-serine (GS) peptide linker. Alternatively, in some embodiments, the TNFR1 antagonists, TNFR2 agonists and bi-specific TNFR1 antagonist/TNFR2 agonist constructs herein also can fused to serum albumin.

[0883] For long-term, high-yield production of recombinant proteins, stable expression is desired. For example, cell lines that stably express a polypeptide can be transformed using expression vectors that contain viral origins of replication or endogenous expression elements and a selectable marker gene. Following the introduction of the vector, cells can be allowed to grow for 1-2 days in an enriched media before they are switched to selective media. The purpose of the selectable marker is to confer resistance to selection, and its presence allows growth and recovery of cells that successfully express the introduced sequences. Resistant cells of stably transformed cells can be proliferated using tissue culture techniques appropriate to the cell types.

[0884] Any number of selection systems can be used to recover transformed cell lines. These include, but are not limited to, the herpes simplex virus (HSV) thymidine kinase (TK) (see, e.g., Wigler et al., (1977) Cell 11:223-232) and adenine phosphoribosyltransferase (APRT) (see, e.g., Lowy, I. et al. (1980) Cell, 22:817-23) genes, which can be employed in TK⁻ or APRT⁻ cells, respectively. Also, antimetabolite, antibiotic or herbicide resistance can be used as the basis for selection. For example, dihydrofolate reductase (DHFR), which confers resistance to methotrexate (see, e.g., Wigler et al. (1980) Proc. Natl. Acad. Sci. U.S.A. 77:3567-70); npt, which confers resistance to the aminoglycosides neomycin and G-418 (see, e.g., Colbere-Garapin et al. (1981) J. Mol. Biol. 150:1-14); and als or pat, which confer resistance to chlorsulfuron and phosphinothricin acetyltransferase, respectively, can be used. Additional selectable genes have been described, for example, trpB, which allows cells to utilize indole in place of tryptophan, or hisD, which allows cells to utilize histinol in place of histidine (see, e.g., Hartman, S. C. and R. C. Mulligan (1988) Proc. Natl. Acad. Sci. U.S.A. 85:8047-8051). Visible markers, such as, but not limited to, anthocyanins, beta glucuronidase and its substrate, GUS, and luciferase and its substrate luciferin, also can be used to identify transformants and also to quantify the amount of transient or stable protein expression attributable to a particular vector system (see, e.g., Rhodes et al. (1995) Methods Mol. Biol. 55:121-131).

a. Prokaryotic Cells

[0885] Prokaryotes, especially E. coli, provide a system for producing large amounts of proteins. Prokaryotic expression systems generally are used for production of products that are not glycosylated. Transformation of E. coli protocols are well-known to those of skill in the art. Expression vectors for E. coli can contain inducible promoters; such promoters are useful for inducing high levels of protein expression and for expressing proteins that exhibit some toxicity to the host cells. Examples of inducible promoters include, for example, the lac promoter, the trp promoter, the hybrid tac promoter, the T7 and SP6 RNA promoters, and the temperature regulated λPL promoter.

[0886] Polypeptides and fusion proteins constructs provided herein, such as any provided herein, can be expressed in the cytoplasmic environment of E. coli. The cytoplasm is a reducing environment, and for some molecules, this can result in the formation of insoluble inclusion bodies. Reducing agents, such as dithiothreitol and 3-mercaptoethanol, and denaturants, such as guanidine-HCl and urea, can be used to resolubilize the proteins. An alternative approach is the expression of proteins in the periplasmic space of bacteria which provides an oxidizing environment and chaperonin-like and disulfide isomerases, and can lead to the production of soluble protein. Typically, a leader sequence is fused to the protein to be expressed, which directs the protein to the periplasm. The leader is then removed by signal peptidases inside the periplasm. Exemplary pathways to translocate expressed proteins into the periplasm are the Sec pathway, the SRP pathway and the TAT pathway. Examples of periplasmic-targeting leader sequences include the pelB leader from the pectate lyase gene, the StII leader sequence, and the DsbA leader sequence, and the leader derived from the alkaline phosphatase gene. In some cases, periplasmic expression allows leakage of the expressed protein into the culture medium. The secretion of proteins allows for quick and simple purification from the culture supernatant. Proteins that are not secreted can be obtained from the periplasm by osmotic lysis. Similar to cytoplasmic expression, in some cases, proteins can become insoluble, and denaturants and reducing agents can be used to facilitate solubilization and refolding. The temperature of induction and growth also can influence expression levels and solubility; typically temperatures between 25° C. and 37° C. are used. Typically, bacteria produce aglycosylated proteins. Thus, if proteins require glycosylation for function, glycosylation can be added in vitro after purification from host cells.

b. Yeast Cells

[0887] Yeasts, such as Saccharomyces cerevisiae, Schizosaccharomyces pombe, Yarrowia lipolytica, Kluyveromyces lactis, and Pichia pastoris, are well-known expression hosts that can be used for the production of proteins, such as any described herein. Yeast can be transformed with episomal replicating vectors or by stable chromosomal integration by homologous recombination. Typically, inducible promoters are used to regulate gene expression. Examples of such promoters include GAL1, GAL7, and GALS, and metallothionein promoters, such as CUP1, AOX1 or other Pichia or other yeast promoters. Expression vectors often include a selectable marker such as LEU2, TRP1, HIS3 and URA3, for selection and maintenance of the transformed DNA. Proteins expressed in yeast are often soluble. Co-expression with chaperonins, such as Bip and protein disulfide isomerase, can improve expression levels and solubility. Additionally, proteins expressed in yeast can be directed for secretion using secretion signal peptide fusions, such as the yeast mating type alpha-factor secretion signal from Saccharomyces cerevisiae, and fusions with yeast cell surface proteins, such as the Aga2p mating adhesion receptor, or the Arxula adeninivorans glucoamylase. A protease cleavage site, such as for the Kex-2 protease, can be engineered to remove the fused sequences from the expressed polypeptides as they exit the secretion pathway. Yeast also is capable of glycosylation at Asn-X-Ser/Thr motifs.

c. Insects and Insect Cells

[0888] Insect cells, particularly using baculovirus expression, are useful for expressing polypeptides, including antibodies or fragments thereof. Insect cells express high levels of protein and are capable of most of the post-translational modifications used by higher eukaryotes. Baculovirus have a restrictive host range which improves the safety and reduces regulatory concerns of eukaryotic expression. Typically, expression vectors use a promoter for high level expression, such as the polyhedrin promoter and p10 promoter of baculovirus. Baculovirus systems include baculoviruses, such as Autographa californica nuclear polyhedrosis virus (AcNPV), and the Bombyx mori nuclear polyhedrosis virus (BmNPV), and an insect cell line, such as Sf9 derived from Spodoptera frugiperda, TN derived from Trichoplusia ni, A7S derived from Pseudaletia unipuncta, and DpN1 derived from Danaus plexippus. For high-level expression, the nucleotide sequence of the molecule to be expressed is fused immediately downstream of the polyhedrin initiation codon of the virus. To generate baculovirus recombinants capable of expressing human antibodies, a dual-expression transfer, such as pAcUW51 (PharMingen) can be used. Mammalian secretion signals are accurately processed in insect cells and can be used to secrete the expressed protein into the culture medium. The cell lines Pseudaletia unipuncta (A7S) and Danaus plexippus (DpN1) produce proteins with glycosylation patterns similar to mammalian cell systems. Exemplary insect cells are those that have been altered to reduce immunogenicity, including those with “mammalianized” baculovirus expression vectors and those lacking the enzyme FT3.

[0889] An alternative expression system in insect cells is the use of stably transformed cells. Cell lines, such as the Schneider 2 (S2) and Kc cells (Drosophila melanogaster), and C7 cells (Aedes albopictus), can be used for expression. The Drosophila metallothionein promoter can be used to induce high levels of expression in the presence of heavy metal induction with cadmium or copper. The baculovirus immediate early gene promoter IE1 can be used to induce consistent levels of expression. Typical expression vectors include the pIE1-3 and pI31-4 transfer vectors (Novagen). Expression vectors are typically maintained by the use of selectable markers, such as neomycin and hygromycin.

d. Mammalian Expression Cells

[0890] Mammalian expression systems can be used to express polypeptides, including the constructs herein, including TNFR1 antagonists, TNFR2 agonists, bi-specific TNFR1 antagonist/TNFR2 agonist constructs, and fusions thereof, provided herein. Expression constructs can be transferred to mammalian cells by viral infection, such as with adenovirus, or by direct DNA transfer, such as by using liposomes, calcium phosphate and DEAE-dextran, and by physical means, such as electroporation and microinjection. Expression vectors for mammalian cells typically include an mRNA cap site, a TATA box, a translational initiation sequence (Kozak consensus sequence) and polyadenylation elements. Internal ribosomal entry site (IRES) elements also can be added to permit bicistronic expression with another gene, such as a selectable marker. Such vectors often include transcriptional promoter-enhancers for high-level expression, such as, for example, the SV40 promoter-enhancer, the human cytomegalovirus (CMV) promoter, and the long terminal repeat of Rous sarcoma virus (RSV). These promoter-enhancers are active in many cell types. Tissue and cell-type promoters and enhancer regions also can be used for expression. Exemplary promoter/enhancer regions include, but are not limited to, those from genes such as elastase I, insulin, immunoglobulin, mouse mammary tumor virus, albumin, alpha-fetoprotein, alpha-1 antitrypsin, beta-globin, myelin basic protein, myosin light chain-2, and gonadotropic releasing hormone gene control.

[0891] Selectable markers can be used to select for and maintain cells with the expression construct. Examples of selectable marker genes include, but are not limited to, hygromycin B phosphotransferase, adenosine deaminase, xanthine-guanine phosphoribosyltransferase, aminoglycoside phosphotransferase, dihydrofolate reductase (DHFR), and thymidine kinase (TK). For example, expression can be performed in the presence of methotrexate to select for only those cells expressing the DHFR gene. Modified anti-TNFR antibodies and antigen-binding fragments thereof can be produced, for example, using a NEO^{R}/G418 system, a dihydrofolate reductase (DHFR) system or a glutamine synthetase (GS) system. The GS system uses joint expression vectors, such as pEE12/pEE6, to express both heavy chain and light chain. Fusion with cell surface signaling molecules, such as TCR-ζ and Fc_{ε}RI-γ, can direct expression of the proteins in an active state on the cell surface.

[0892] Many cell lines are available for mammalian expression, including mouse, rat, human, monkey, chicken and hamster cells. Exemplary cell lines include, but are not limited to, BHK (e.g., BHK-21 cells), 293-F, CHO, CHO Express (CHOX; ExcellGene), Balb/3T3, HeLa, MT2, mouse NSO (non-secreting), and other myeloma cell lines, hybridoma and heterohybridoma cell lines, lymphocytes, fibroblasts, Sp2/0, COS, NIH3T3, HEK293, 293S, 2B8, and HKB cells. Cell lines that are adapted to serum-free media also are available, which facilitates purification of secreted proteins from the cell culture media. Examples include CHO-S cells (Invitrogen®, Carlsbad, CA, cat #11619-012) and the serum free EBNA-1 cell line (see, e.g., Pham et al. (2003) Biotechnol. Bioeng. 84:332-342). Cell lines that are adapted for growth in special mediums that are optimized for maximal expression also are available. For example, DG44 CHO cells are adapted to grow in suspension culture in a chemically defined, animal product-free medium.

e. Plants

[0893] Transgenic plant cells and plants can be used to express polypeptides and proteins, such as any described herein. Expression constructs are typically transferred to plants using direct DNA transfer, such as by microprojectile bombardment and PEG-mediated transfer into protoplasts, and with agrobacterium-mediated transformation. Expression vectors can include promoter and enhancer sequences, transcriptional termination elements, and translational control elements. Expression vectors and transformation techniques are usually divided between dicot hosts, such as Arabidopsis and tobacco, and monocot hosts, such as corn and rice. Examples of plant promoters used for expression include, for example, the cauliflower mosaic virus promoter (CaMV 35S), the nopaline synthase promoter, the ribose bisphosphate carboxylase promoter, and the ubiquitin (e.g., maize ubiquitin-1 (ubi-1)) and UBQ3 promoters. Selectable markers, such as hygromycin, phosphomannose isomerase and neomycin phosphotransferase, are often used to facilitate selection and maintenance of transformed cells. Transformed plant cells can be maintained in culture as cells, aggregates (callus tissue) or regenerated into whole plants. Transgenic plant cells also can include algae engineered to produce polypeptides. Because plants have different glycosylation patterns than mammalian cells, this can influence the choice of protein produced in these hosts.

### 5. Purification

[0894] Host cells transformed with a nucleic acid encoding polypeptide constructs provided herein can be cultured under conditions suitable for the expression and recovery of the encoded protein from cell culture. The protein produced by a recombinant cell is generally secreted, but can be contained intracellularly, depending on the sequence and/or the vector used. As understood by those of skill in the art, expression vectors containing nucleic acid molecules encoding polypeptides provided herein can be designed with signal sequences that facilitate direct secretion of expressed polypeptides through prokaryotic or eukaryotic cell membranes.

[0895] Methods for purification of polypeptides from host cells depend on the chosen host cells and expression systems. For secreted molecules, proteins are generally purified from the culture media after removing the cells. For intracellular expression, cells can be lysed, and the proteins can be purified from the extract. When transgenic organisms, such as transgenic plants and animals, are used for expression, tissues or organs can be used as starting material to make a lysed cell extract. Additionally, transgenic animal production can include the production of polypeptides in milk or eggs, which can be collected, and if necessary, the proteins can be extracted and further purified using standard methods in the art.

[0896] Polypeptides, such as the TNFR1 antagonist constructs, TNFR2 agonist constructs, TNFR1 antagonist/TNFR2 agonist bi-specific constructs, and other constructs provided herein, and components thereof, can be purified using protein purification techniques known to those of skill in the art. These include, but are not limited to, limited to, SDS-PAGE, size fractionation and size exclusion chromatography, ammonium sulfate precipitation, chelate chromatography, column chromatography, HPLC, dialysis, and ionic exchange chromatography, such as anion exchange, and combinations thereof. Affinity purification techniques also can be used. The constructs herein can be purified using methods developed for purification of antibodies and antibody fragments. Exemplary of a method to purify antibodies and antibody fragments are methods that include column chromatography, where a solid support column material is linked to Protein G, a cell surface-associated protein from Streptococcus, that binds immunoglobulins with high affinity. Antibodies and antibody fragments also can be purified by methods that include protein A chromatography, in which protein A, a cell surface-associated protein from Staphylococcus aureus, which binds immunoglobulins, such as IgGs, with high affinity, is bound to a solid support column. Other immunoglobulin-binding bacterial proteins that can be used to purify the antibodies and antibody fragments, include Protein A/G, a recombinant fusion protein that combines the IgG binding domains of Protein A and Protein G; and Protein L, a surface protein from Peptostreptococcus (see, e.g., Bjorck (1988) J. Immunol. 140(4):1194-1197; Kastern et al. (1992) J. Biol. Chem. 267(18):12820-12825; Eliasson et al. (1988) J. Biol. Chem. 263:4323-4327). The constructs are substantially pure, which is typically at least or at least about 90%, 91%, 92%, 93%, 94%, 95%, 96%, 97%, 98% or 99% purity. Purity can be assessed by standard methods, such as by SDS-PAGE and Coomassie blue staining.

[0897] When antibodies and fragments thereof and related polypeptides are expressed by transformed bacteria in large amounts, typically after promoter induction, although expression can be constitutive, the polypeptides can form insoluble aggregates. Protocols for purification of polypeptide inclusion bodies are known to one of skill in the art. For example, in one method, a cell suspension is centrifuged to pellet the inclusion bodies, and the pellet containing the inclusion bodies is re-suspended in a buffer, such as, for example, 20 mM Tris-HCL (pH 7.2), 1 mM EDTA, 150 mM NaCl and 2% Triton-X 100, a non-ionic detergent, which does not harm the inclusion bodies, but dissolved contaminants. The wash step can be repeated to remove as much cellular debris as possible. The remaining pellet of inclusion bodies is re-suspended in an appropriate buffer, such as 20 mM sodium phosphate, pH 6.8, 150 mM NaCl. Other appropriate buffers, as well as alternative purification protocols, are known or can be developed by one of skill in the art.

[0898] Other methods for purifying, antibodies and fragments thereof, and the constructs provided herein, can be used or developed. They can be purified from bacterial periplasm. For polypeptides exported into the periplasm of bacteria in which the polypeptide is produced, the periplasmic fraction of the bacteria can be isolated by cold osmotic shock, in addition to other methods known to those of skill in the art. For example, in one method, to isolate recombinant polypeptides from the periplasm, the bacterial cells are centrifuged to form a pellet. The pellet is re-suspended in a buffer containing 20% sucrose. To lyse the cells, the bacteria are centrifuged and the pellet is re-suspended in ice-cold 5 mM MgSO₄ and kept in an ice bath for approximately 10 minutes. The cell suspension is centrifuged and the supernatant is decanted and saved. The recombinant polypeptides present in the supernatant can be separated from the host proteins by standard separation techniques that are well-known to those of skill in the art. These methods include, but are not limited to, the following steps: solubility fractionation, size differential filtration, and column chromatography.

[0899] Expression constructs also can be engineered to include a nucleic acid encoding an affinity tag, for example for detection or purification of the expressed product, operatively linked, upon expression to the encoded polypeptide. Affinity tags, include, for example, a Small Ubiquitin-like Modifier (SUMO) tag, a myc epitope, a GST fusion or His₆, for affinity purification with SUMO, myc antibody, glutathione resin and Ni-resin, respectively. Nucleic acid encoding such tags can be joined to the nucleic acid encoding the polypeptide constructs provided herein. The tags can facilitate purification and/or detection of soluble proteins. For example, a TNFR1 antagonist polypeptide construct or portion thereof can be expressed as a recombinant protein with one or more additional polypeptide domains added to facilitate protein purification. Purification facilitating domains include, but are not limited to, metal chelating peptides, such as histidine-tryptophan modules that allow purification on immobilized metals, protein A domains that allow purification on immobilized immunoglobulin, and the domain utilized in the FLAGS extension/affinity purification system (Immunex Corp., Seattle, WA). The inclusion of nucleic acid encoding a cleavable linker sequence, such as a Factor Xa cleavable recognize site (Ile-Glu-Gly-Arg, engineered to include a Nru I restrictions site, see, e.g., EP 92115607A) or enterokinase (Invitrogen (Thermo Fisher Scientific), San Diego, CA), between the purification domain and an encoded expressed polypeptide, facilitate purification. An exemplary expression vector encodes for expression of a fusion protein containing a TNFR1 antagonist and/or a TNFR2 agonist polypeptide and an enterokinase cleavage site. The Small Ubiquitin-like Modifier (SUMO) tag facilitates purification on immobilized metal ion affinity chromatography (IMIAC), and the enterokinase cleavage site provides a cleavage site for purifying the polypeptide from the fusion protein.

[0900] Purity can be assessed by any method known in the art, including gel electrophoresis, orthogonal HPLC methods, staining and spectrophotometric techniques. The expressed and purified polypeptide can be analyzed using any assay or method known to one of skill in the art, for example, any described herein. These include assays based on the physical and/or functional properties of the polypeptide, including, but not limited to, analysis by gel electrophoresis, immunoassays, binding assays, and assays of TNF-mediated TNFR1 and/or TNFR2 activity.

### 6. Additional Modifications

[0901] The modified TNFR1 antagonist constructs, TNFR2 agonist constructs, bi-specific TNFR1 antagonist/TNFR2 agonist constructs, and other constructs, and components thereof provided, as described above, include components (activity modifiers) that alter pharmacological properties, including pharmacokinetic and pharmacodynamic properties. The portions of the constructs, such as TNFR1 inhibitor polypeptides and small molecules, and TNFR2 agonist polypeptides and small molecules, can be conjugated to a polymer or polymeric moiety, such as, but not limited to, a polyethylene glycol (PEG) moiety or dextran, or to human serum albumin (HSA), or can be sialylated to reduce immunogenicity and/or to increase half-life in serum and other body fluids. The polypeptides also can be linked to a purification tag, such as a His tag or a SUMO sequence. Additional modifications include, for example, glycosylation, carboxylation, hydroxylation, phosphorylation, or other known modifications. Glycosylation can be incorporated in vivo, using an appropriate expression system, such as a mammalian expression system, in vitro, or via a combination of in vivo and in vitro methods in which, for example, the polypeptide is expressed in prokaryotic cells and is further modified in vitro using enzymatic transglycosylation. Other modifications can be made in vitro or, for example, by producing the modified polypeptide in a suitable host that produces such modifications.

[0902] These modifications or activity modifiers and modifications are effected and selected so that the modified polypeptide incorporates the functionality of the modification and retains at least a portion, generally at least 50%, 60%, 70%, 80%, 90%, or 95% activity compared with a non-fused or unmodified polypeptide, including 96%, 97%, 98%, 99% or greater activity compared with a non-fusion or unmodified polypeptide. For example, TNFR1 antagonist constructs retain the ability to inhibit TNF-mediated signaling via TNFR1.

[0903] Linkage of a polypeptide such as a TNFR1 antagonist or TNFR2 agonist, with another polypeptide, can be effected directly or indirectly via a linker. In one example, linkage can be by chemical linkage, such as via heterobifunctional agents, or thiol linkages, or other such linkages. Fusion also can be effected by recombinant expression. Fusion of a polypeptide, such as a TNFR1 antagonist or TNFR2 agonist, to another polypeptide, can be to the N- or C-terminus of the TNFR1 antagonist or TNFR2 agonist polypeptide. Non-limiting examples of polypeptides that can be used in fusion proteins with a TNFR1 antagonist or TNFR2 agonist polypeptide provided herein include, for example, a GST (glutathione S-transferase) polypeptide, an Fc domain from immunoglobulin G, albumin, a heterologous signal sequence, and combinations thereof.

[0904] The encoded constructs can be produced by standard recombinant techniques. For example, DNA fragments encoding the different polypeptide portions can be ligated together in-frame, in accordance with conventional techniques, e.g., by employing blunt-ended or stagger-ended termini for ligation, restriction enzyme digestion to provide for appropriate termini, filling-in of cohesive ends as appropriate, alkaline phosphatase treatment to avoid undesirable joining, and enzymatic ligation. The fusion gene can be synthesized by conventional techniques, including automated DNA synthesizers. Alternatively, PCR amplification of gene fragments can be carried out using anchor primers that give rise to complementary overhangs between two consecutive gene fragments that subsequently can be annealed and re-amplified to generate a chimeric gene. Many expression vectors are commercially available that already encode a fusion moiety (e.g., a GST polypeptide). A polypeptide-encoding nucleic acid can be cloned into such an expression vector such that the fusion moiety is linked in-frame to the TNFR1 antagonist, TNFR2 agonist, and multi-specific, such as bi-specific, constructs provided herein.

a. PEGylation

[0905] Polyethylene glycol (PEG) is used in biomaterials, biotechnology and medicine; it is a biocompatible, nontoxic, water-soluble polymer that generally is non-immunogenic. In the area of drug delivery, PEG derivatives are used in covalent attachment to proteins (i.e., “PEGylation”), to reduce immunogenicity, proteolysis, and kidney clearance, and to increase serum half-life, and enhance solubility (see, e.g., Zalipsky (1995) Adv. Drug Del. Rev. 16:157-182). PEG has been attached to low molecular weight, relatively hydrophobic drugs to enhance solubility, reduce toxicity and alter biodistribution. Conjugation to linear or branched-chain PEG moieties increases the molecular mass and hydrodynamic radius of the polypeptide, and decreases the rate of glomerular filtration by the kidneys. Typically, PEGylated drugs are administered, such as by injection, as solutions. In the constructs herein, PEGylation moieties and other such polymers can be part of the linker portions of the constructs.

[0906] A related application is the synthesis of cross-linked degradable PEG networks or formulations for use in drug delivery, since much of the same chemistry used in the design of degradable, soluble drug carriers also can be used in the design of degradable gels (see, e.g., Sawhney et al. (1993) Macromolecules 26:581-587). Intermacromolecular complexes can be formed by mixing solutions of two complementary polymers. Such complexes are stabilized by electrostatic interactions (polyanion-polycation) and/or hydrogen bonds (polyacid-polybase) between the polymers involved, and/or by hydrophobic interactions between the polymers in a medium (see, e.g., Krupers et al. (1996) Eur. Polym. J. 32:785-790). For example, mixing solutions of polyacrylic acid (PAAc) and polyethylene oxide (PEO) under the proper conditions results in the formation of complexes based mostly on hydrogen bonding. Dissociation of these complexes at physiologic conditions has been used for delivery of free (i.e., non-PEGylated) drugs. Complexes of complementary polymers have been formed from homopolymers and copolymers.

[0907] Numerous reagents for PEGylation are known, as are PEGylated therapeutic proteins. Such reagents include, but are not limited to, N-hydroxysuccinimidyl (NHS) activated PEG, succinimidyl mPEG, mPEG₂-N-hydroxysuccinimide, mPEG succinimidyl alpha-methylbutanoate, mPEG succinimidyl propionate, mPEG succinimidyl butanoate, mPEG carboxymethyl 3-hydroxybutanoic acid succinimidyl ester, homobifunctional PEG-succinimidyl propionate, homobifunctional PEG propionaldehyde, homobifunctional PEG butyraldehyde, PEG maleimide, PEG hydrazide, p-nitrophenyl-carbonate PEG, mPEG-benzotriazole carbonate, propionaldehyde PEG, mPEG butryaldehyde, branched mPEG₂ butyraldehyde, mPEG acetyl, mPEG piperidone, mPEG methylketone, mPEG “linkerless” maleimide, mPEG vinyl sulfone, mPEG thiol, mPEG orthopyridylthioester, mPEG orthopyridyl disulfide, Fmoc-PEG-NHS, Boc-PEG-NHS, vinylsulfone PEG-NHS, acrylate PEG-NHS, fluorescein PEG-NHS, and biotin PEG-NHS (see, e.g., Veronese et al. (1997) J. Bioactive Compatible Polymers 12:197-207; and numerous U.S. and worldwide patents). In one example, the polyethylene glycol has a molecular weight ranging from about 3 kDa to about 50 kDa, and typically from about 5 kDa to about 30 kDa. Covalent attachment of the PEG to the drug (known as “PEGylation”) can be accomplished by known chemical synthesis techniques. For example, the PEGylation of protein can be accomplished by reacting NHS-activated PEG with the protein under suitable reaction conditions.

[0908] While numerous reactions have been described for PEGylation, those that are most generally applicable for proteins confer directionality, use mild reaction conditions, and do not necessitate extensive downstream processing to remove toxic catalysts or bi-products. For instance, monomethoxy PEG (mPEG) has only one reactive terminal hydroxyl, and thus, its use limits some of the heterogeneity of the resulting PEG-protein product mixture. Activation of the hydroxyl group at the end of the polymer opposite to the terminal methoxy group is generally necessary to accomplish efficient protein PEGylation, with the aim being to make the derivatized PEG more susceptible to nucleophilic attack. The attacking nucleophile is usually the epsilon-amino group of a lysyl residue, but other amines also can react (e.g., the N-terminal alpha-amine or the ring amines of histidine), if local conditions are favorable. A more directed attachment is possible in proteins containing a single lysine or cysteine. The latter residue can be targeted by PEG-maleimide for thiol-specific modification. Alternatively, PEG hydrazide can be reacted with a periodate oxidized protein and reduced in the presence of NaCNBH₃. More specifically, PEGylated CMP sugars can be reacted with a protein in the presence of appropriate glycosyl-transferases. One technique is the “PEGylation” technique where a number of polymeric molecules are coupled to the polypeptide in question. When using this technique, the immune system has difficulties in recognizing the epitopes on the polypeptide's surface that are responsible for the formation of antibodies, thereby reducing the immune response. For polypeptides introduced directly into the circulatory system of the human body to give a particular physiological effect (i.e., pharmaceuticals), the typical potential immune response is an IgG and/or IgM response, while polypeptides which are inhaled through the respiratory system (i.e., industrial polypeptides) potentially can cause an IgE response (i.e., allergic response). One of the theories explaining the reduced immune response is that the polymeric molecule(s) shield(s) epitope(s) on the surface of the polypeptide that are responsible for the immune response leading to antibody formation. Another theory, or at least a partial factor, is that the heavier the conjugate is, the more reduced the immune response.

[0909] For example, PEGylate polypeptide constructs and polypeptide components provided herein, PEG moieties are conjugated, via covalent attachment, to the polypeptides. Techniques for PEGylation include, but are not limited to, the use of specialized linkers and coupling chemistries (see, e.g., Harris (2002) Adv. Drug Deliv. Rev. 54:459-476), attachment of multiple PEG moieties to a single conjugation site (such as via use of branched PEGs; see, e.g., Veronese et al., (2002) Bioorg. Med. Chem. Lett. 12:177-180), site-specific PEGylation and/or mono-PEGylation (see, e.g., Chapman et al. (1999) Nature Biotech. 17:780-783), and site-directed enzymatic PEGylation (see, e.g., Sato (2002) Adv. Drug Deliv. Rev. 54:487-504). Methods and techniques described in the art can produce proteins having 1, 2, 3, 4, 5, 6, 7, 8, 9, 10, or more than 10, PEG or PEG derivatives attached to a single protein molecule (see, e.g., U.S. Patent Publication No. 2006/0104968).

b. Albumination

[0910] The polypeptides provided herein, such as the TNFR1 antagonist constructs, TNFR2 agonist constructs, and multi-specific TNFR1 antagonist/TNFR2 agonist constructs, can be fused to albumin (i.e., “albuminated”), for human therapeutics, to human serum albumin (HSA), to increase the half-life, stability, bioavailability, and distribution, and/or to improve the pharmacological properties, such as pharmacokinetics, of the polypeptides. Numerous products linked to human serum albumin (HSA) are approved for use as therapeutics, including for use as cancer therapeutics and for the treatment of type 2 diabetes (see, e.g., AlQahtani et al. (2019) Biomed and Pharmacotherapy 113:108750; Roscoe et al. (2018) Mol. Pharmaceutics 151:15046-5047; Strohl, W. R. (2015) BioDrugs 4:215-239). In some examples, the mature HSA protein, lacking the signal sequence and activation sequence, is fused to a protein of interest. In some examples, serum albumin, such as human serum albumin (HSA), is conjugated to the polypeptide. An exemplary HSA protein is set forth in SEQ ID NO:35.

[0911] Fusions with HSA are provided herein. These include fusion with HSA to the N- or C-terminus of the TNFR1 antagonist (e.g., dAbs, scFvs, Fabs or other antigen-binding fragments, as provided herein), or the TNFR2 agonists (e.g., TNF mutein), generally, via a short peptide linker, such as, but not limited to, a glycine-serine (GS) linker, such as (GSGS)ₙ or (GGGGS)ₙ, where n=1-5 or 6. Exemplary TNFR1 antagonist-HSA fusions are set forth in SEQ ID NOs: 709, 713, 717, 721, and 725.

c. Purification Tags

[0912] In some examples, the TNFR1 antagonist constructs, TNFR2 agonist constructs, multi-specific, such as bi-specific, TNFR1 antagonist/TNFR2 agonist constructs and fusion proteins, provided herein, can contain a tag for purification of the product. Exemplary tags for purification are described elsewhere herein. For example, exemplary polypeptides herein can contain a SUMO or His sequence for purification. Generally, the tags are cleavable tags.

[0913] The polypeptide constructs, including fusion proteins, provided herein can include a His purification tag, such as a 6×His tag. His-tagged polypeptides optionally can contain a fusion partner, and/or a signal for expression and secretion. For example, the exemplary His-polypeptide fusion proteins can contain one or more of a human immunoglobulin light chain kappa (x) leader signal peptide sequence (SEQ ID NO:835), a 6×His tag (SEQ ID NO:836), a SUMO sequence (SEQ ID NO:837), and HSA (SEQ ID NO:35). In another example, the exemplary His tagged-polypeptide fusion proteins can contain the human immunoglobulin light chain kappa (x) leader signal peptide sequence (SEQ ID NO:835), a 6×His tag (SEQ ID NO:836), a SUMO sequence (SEQ ID NO:837), and an IgG Fc (see, e.g., SEQ ID NOs: 10, 12, 14, 16, 27, and 30).

[0914] In some embodiments, the polypeptides and fusion proteins provided herein can include a His tag and/or SUMO sequences for accumulation in inclusion bodies. For example, the His-SUMO sequence set forth in SEQ ID NO:838, can be linked to any of the polypeptides or fusion proteins provided herein. His-SUMO tagged polypeptides optionally can contain a fusion partner, and/or a signal for expression and secretion. For example, the His-SUMO-polypeptide fusion proteins can contain the human immunoglobulin light chain kappa (κ) leader signal peptide sequence (SEQ ID NO:835), a 6×His tag (SEQ ID NO:836), a SUMO sequence (SEQ ID NO:837), and HSA (SEQ ID NO:35). In another example, the exemplary His-SUMO-polypeptide fusion proteins can contain the human immunoglobulin light chain kappa (x) leader signal peptide sequence (SEQ ID NO:835), a 6×His tag (SEQ ID NO:836), a SUMO sequence (SEQ ID NO:837), and an IgG Fc (see, e.g., SEQ ID NOs: 10, 12, 14, 16, 27, and 30).

### 7. Nucleic Acid Molecules and Gene Therapy

[0915] Nucleic acid molecules encoding polypeptide constructs that are fusion proteins that are provided herein can be used for gene therapy, such as, for expression in gene therapy vectors or for administration as DNA or RNA constructs. Among these, some of the TNFR1 antagonist, TNFR2 agonist, and bi-specific TNFR1 antagonist/TNFR2 agonist constructs that are provided herein are provided as fusion proteins. Nucleic acid molecules encoding these constructs, as well as vectors and other delivery vehicles, are provided herein. The nucleic acid molecules can encode polypeptides having at least 80%, 85%, 90%, 91%, 92%, 93%, 94%, 95%, 96%, 97%, 98%, or 99% sequence identity to any polypeptide or construct provided herein. In another embodiment, a nucleic acid molecule can include those with degenerate codon sequences encoding any of the polypeptides or constructs provided herein.

[0916] The nucleic acids molecules for use for in gene therapy are operably-linked to regulatory sequences of nucleic acids, as needed. These include promoters, enhancers, signal sequences and other trafficking sequences, and other such regulatory sequences that are well-known to those of skill in the art. For vectors with particular tissue tropisms, the regulatory sequences can be specific for such tissues, such as the liver for long-term gene expression, or the eye for any ophthalmic applications. Exemplary promoters include inducible and constitutive promoters for expression in mammalian cells. Such promoters, which are those recognized in a eukaryotic, such as a mammalian, subject, include, but are not limited to, CMV and SV40 promoters; adenovirus promoters, such as the E2 gene promoter, which is responsive to the E7 oncoprotein; a PV promoter, such as the BPV p89 promoter that is responsive to the PV E2 protein; and other suitable promoters.

[0917] A polypeptide provided herein also can be delivered to the cells in gene transfer vectors. The transfer vectors also can encode additional other therapeutic agent(s) for treatment of the disease or disorder, such as rheumatoid arthritis, or any other chronic inflammatory, autoimmune, neurodegenerative, or demyelinating disease or disorder, described herein or known in the art, for which the polypeptide is administered. Transfer vectors encoding a polypeptide provided herein can be used systemically, by administering the nucleic acid molecule to a subject. For example, the transfer vector can be a viral vector, such as an adenovirus vector. Vectors encoding a polypeptide or construct herein also can be incorporated into stem cells, and such stem cells can be administered to a subject, such as by transplanting or engrafting the stem cells at sites for therapy. For example, mesenchymal stem cells (MSCs) can be engineered to express a therapeutic polypeptide, and such MSCs can be engrafted at a transplant site for therapy.

[0918] Rather than delivering the protein, the nucleic acid can be administered in vivo, such as systemically, or by any other route, or ex vivo, such as by removal of cells, including lymphocytes, introduction of the nucleic acid therein, and reintroduction into the host, or a compatible recipient.

[0919] Polypeptides can be delivered to cells and tissues by expression of nucleic acid molecules. Polypeptides can be administered as nucleic acid molecules encoding the polypeptides, including ex vivo techniques, and direct in vivo expression. Nucleic acids can be delivered to cells and tissues by any method known to those of skill in the art. The isolated nucleic acid sequences can be incorporated into vectors for further manipulation. Methods for administering polypeptides by expression of encoding nucleic acid molecules include administration of recombinant vectors. The vector can be designed to remain episomal, such as by inclusion of an origin of replication, or can be designed to integrate into a chromosome in the cell. Nucleic acid molecules encoding polypeptides provided herein also can be used in ex vivo gene expression therapy using non-viral vectors. For example, cells can be engineered to express a polypeptide, either operatively linked to regulatory sequences, or such that it is placed operatively linked to regulatory sequences in a genomic location. Such cells then can be administered locally or systemically to a subject, such as a patient in need of treatment.

[0920] Gene therapy vectors can remain episomal, or can integrate into chromosomes of the treated subject. A polypeptide can be expressed by a virus, which is administered to a subject in need of treatment. Viral vectors suitable for gene therapy include adenoviruses, adeno-associated viruses (AAVs), retroviruses, lentiviruses, vaccinia viruses, and others noted above. Viral vectors, which include, for example, adenoviruses, adeno-associated viruses (AAVs), poxviruses, herpesviruses, retroviruses, and others designed for gene therapy, can be employed. AAV vectors with altered tropism, such as for liver cells, are available. AAV vectors are composed of a capsid that confers the tropism, and nucleic acid encoding the polypeptide flanked by ITRs.

[0921] For example, adenovirus expression technology is well-known in the art, and adenovirus production and administration methods also are well-known. Adenovirus serotypes are available, for example, from the American Type Culture Collection (ATCC, Rockville, MD). Adenovirus vectors can be used ex vivo, for example, cells are isolated from a patient in need of treatment, and transduced with a polypeptide-expressing adenovirus vector. After a suitable culturing period, the transduced cells are administered to a subject, locally and/or systemically. Alternatively, polypeptide adenovirus particles are isolated and formulated in a pharmaceutically-acceptable carrier for delivery of a therapeutically effective amount to prevent, treat, or ameliorate a disease or condition of a subject. Typically, adenovirus particles are delivered at a dose ranging from 1 particle to 10¹⁴ particles per kilogram subject weight, generally between 10⁶ or 10⁸ particles to 10¹² particles per kilogram subject weight. In some situations, it is desirable to provide a nucleic acid source with an agent that targets cells, such as an antibody specific for a cell surface membrane protein or a target cell, or a ligand for a receptor on a target cell. The polypeptides or constructs provided herein also can be targeted for delivery into specific cell types. For example, adenoviral vectors encoding the polypeptides or constructs provided herein can be used for stable expression in nondividing cells, such as liver cells (see, e.g., Margaritis et al. (2004) J. Clin. Invest. 113:1025-1031). In another example, viral or non-viral vectors encoding polypeptides or constructs herein can be transduced into isolated cells for subsequent delivery. Additional cell types for expression and delivery include, but are not limited to, fibroblasts and endothelial cells.

[0922] The nucleic acid molecules can be introduced into artificial chromosomes, and other non-viral vectors. Artificial chromosomes, such as ACES (see, Lindenbaum et al., (2004) Nucleic Acids Res. 32(21):e172), can be engineered to encode and express the isoform. Briefly, mammalian artificial chromosomes (MACs) provide a means to introduce large payloads of genetic information into the cell in an autonomously replicating, non-integrating format. Unique among MACs, the mammalian satellite DNA-based Artificial Chromosome Expression (ACE) can be reproducibly generated de novo in cell lines of different species and readily purified from the host cells' chromosomes. Purified mammalian ACEs can then be re-introduced into a variety of recipient cell lines where they have been stably maintained for extended periods in the absence of selective pressure using an ACE System. Using this approach, specific loading of one or two gene targets has been achieved in LMTK(−) and CHO cells.

[0923] Another method for introducing nucleic acids encoding a polypeptide is a two-step gene replacement technique in yeast, starting with a complete adenovirus genome (Ad2; Ketner et al. (1994) Proc. Natl. Acad. Sci. U.S.A. 91: 6186-6190) cloned in a Yeast Artificial Chromosome (YAC) and a plasmid containing adenovirus sequences to target a specific region in the YAC clone, an expression cassette for the gene of interest and a positive and negative selectable marker. YACs are of particular interest because they permit incorporation of larger genes. This approach can be used for construction of adenovirus-based vectors bearing nucleic acids encoding any of the described polypeptides or constructs herein for gene transfer to mammalian cells or whole animals.

[0924] The nucleic acids can be encapsulated in a vehicle, such as a liposome, or introduced into a cell, such as a bacterial cell, particularly an attenuated bacterium, or introduced into a viral vector. For example, when liposomes are employed, proteins that bind to a cell surface membrane protein associated with endocytosis can be used for targeting and/or to facilitate uptake, e.g., capsid proteins or fragments thereof tropic for a particular cell type, antibodies for proteins which undergo internalization in cycling, and proteins that target intracellular localization and enhance intracellular half-life.

[0925] For ex vivo and in vivo methods, nucleic acid molecules encoding the polypeptide or construct herein is introduced into cells that are from a suitable donor or the subject to be treated. Cells into which a nucleic acid can be introduced for purposes of therapy include, for example, any desired, available cell type appropriate for the disease or condition to be treated, including but not limited to epithelial cells; endothelial cells; keratinocytes; fibroblasts; muscle cells; hepatocytes; blood cells, such as T lymphocytes, B lymphocytes, monocytes, macrophages, neutrophils, eosinophils, megakaryocytes, and granulocytes; and various stem or progenitor cells, in particular, hematopoietic stem or progenitor cells, such as stem cells obtained from bone marrow, umbilical cord blood, peripheral blood, fetal liver, and other sources thereof.

[0926] For ex vivo treatment, cells from a donor compatible with the subject to be treated or cells from the subject to be treated are removed, the nucleic acid is introduced into these isolated cells, and the modified cells are administered to the subject. Treatment includes direct administration, such as, for example, encapsulated within porous membranes, which are implanted into the patient (see, e.g., U.S. Pat. Nos. 4,892,538 and 5,283,187, each of which is herein incorporated by reference in its entirety). Techniques suitable for the transfer of nucleic acid into mammalian cells in vitro include the use of liposomes and cationic lipids (e.g., DOTMA, DOPE and DC-Chol) electroporation, microinjection, cell fusion, DEAE-dextran, and calcium phosphate precipitation methods. Methods of DNA delivery can be used to express the polypeptides or constructs provided herein in vivo. Such methods include liposome delivery of nucleic acids and naked DNA delivery, including local and systemic delivery, such as using electroporation, ultrasound, and calcium-phosphate delivery. Other techniques include microinjection, cell fusion, chromosome-mediated gene transfer, microcell-mediated gene transfer, and spheroplast fusion.

[0927] In vivo expression of a polypeptide or construct herein can be linked to expression of additional molecules. For example, expression of a polypeptide can be linked with expression of a cytotoxic product, such as in an engineered virus, or expressed in a cytotoxic virus. Such viruses can be targeted to a particular cell type that is a target for a therapeutic effect.

[0928] In vivo expression of a polypeptide or construct provided herein can include operatively linking polypeptide-encoding nucleic acid molecules to specific regulatory sequences, such as a cell-specific or tissue-specific promoter. Polypeptides also can be expressed from vectors that specifically infect and/or replicate in target cell types and/or tissues. Inducible promoters can be used to selectively regulate polypeptide or construct expression.

[0929] Nucleic acid molecules, such as naked nucleic acids, or vectors, artificial chromosomes, liposomes and other vehicles can be administered to the subject by systemic administration, topical, local and other routes of administration. When systemic and in vivo, the nucleic acid molecule or vehicle containing the nucleic acid molecule can be targeted to a cell. Administration can include intravenous administration, and direct injection into a tissue, such as direct injection into the liver, including methods of direct injection into a compartmentalized organ or portion thereof, such as the liver (see, e.g., U.S. Pat. No. 9,821,114).

[0930] Administration also can be direct, such as by administration of a vector or cells that typically targets a cell or tissue. Cells used for in vivo expression of a polypeptide or construct herein also include cells autologous to the patient. Such cells can be removed from a patient, the nucleic acids for expression of a polypeptide introduced, and then administered to a patient, such as by injection or engraftment.

### I. Compositions, Formulations and Dosages

[0931] Provided are pharmaceutical compositions containing, in a pharmaceutically acceptable vehicle, any of the polypeptides and constructs provided herein, including the TNFR1 antagonist constructs, the TNFR2 agonist constructs, and multi-specific, such as bi-specific, TNFR1 antagonist/TNFR2 agonist constructs, including fusion proteins, or nucleic acid molecules encoding the polypeptides or constructs. Such compositions contain an amount of the polypeptides, constructs, or nucleic acids that can be diluted to a therapeutically effective amount, or that are formulated for direct administration without dilution. The particular concentration of a construct or nucleic acid depends upon a variety of parameters within the skill of a skilled artisan, including, for example, the treated indication, the construct or nucleic acid, the route of administration, and the regimen. Routes of administration include systemic and local routes, oral, rectal, intravenous, intramuscular, subcutaneous, mucosal, peritoneal, and any suitable route known to the skilled person.

[0932] A selected amount, such as a therapeutically effective amount, depending, as discussed above, on various parameters of the constructs provided herein, including the TNFR1 antagonist constructs, the TNFR2 agonist constructs, and multi-specific, such as bi-specific, TNFR1 antagonist/TNFR2 agonist constructs, including fusion proteins, or nucleic acid molecules encoding the constructs, is formulated in a suitable vehicle for administration. The pharmaceutical compositions can be formulated in any conventional manner, by mixing a selected amount of a construct or mixture thereof with one or more physiologically acceptable carriers or excipients or vehicles The pharmaceutical composition can be used for therapeutic, prophylactic, and/or diagnostic applications. The concentration of the active compound, i.e., the construct or nucleic acid, in a composition, depends on a variety of factors, including those noted above, as well as the absorption, inactivation, and excretion rates of the active compound, the dosage schedule, and the amount administered, the age and size of the subject, as well as other factors known to those of skill in the art.

[0933] Pharmaceutical carriers or vehicles suitable for administration of the compounds provided herein include any such carriers known to those skilled in the art to be suitable for the particular mode of administration. Pharmaceutical compositions that include a therapeutically effective amount of a construct or nucleic acid molecule described herein also can be provided as a lyophilized powder that is reconstituted, such as with sterile water, immediately prior to administration.

### 1. Formulations

[0934] Pharmaceutical compositions containing any of the constructs and nucleic acids provided herein can be formulated in any conventional manner, by mixing a selected amount of the active compound with one or more physiologically acceptable carriers or excipients. Selection of the carrier or excipient is within the skill of the administering professional, and can depend upon a number of parameters. These include, for example, the mode of administration (i.e., systemic, oral, nasal, pulmonary, local, topical, or any other mode), and the disorder treated. Generally, the pharmaceutical compositions include components that do not significantly impair the biological properties of the constructs or nucleic acid or encoded polypeptide or that enhance or improve pharmacological properties thereof. The formulations also can be co-formulations with other active agents for combination therapy.

[0935] The pharmaceutical compositions provided herein can be in various forms, such as, but are limited to, in solid, semi-solid, liquid, emulsions, powder, aqueous, and lyophilized forms. The pharmaceutical compositions provided herein can be formulated for single dosage (direct) administration, or for dilution, or other regimen. The concentrations of the compounds in the formulations are effective, either following dilution or mixing with another composition, or for direct administration, for delivery of an amount, upon administration, that is effective for the intended treatment. The compositions can be formulated in an amount single or multiple dosage direct administration. The compound can be suspended in micronized or other suitable form, or can be derivatized to produce a more soluble active product. The form of the resulting mixture depends upon a number of factors, including the intended mode of administration, and the solubility of the compound in the selected carrier or vehicle. The resulting mixtures are solutions, suspensions, emulsions and other such mixtures, and can be formulated as non-aqueous or aqueous mixtures, creams, gels, ointments, emulsions, solutions, elixirs, lotions, suspensions, tinctures, pastes, foams, aerosols, irrigations, sprays, suppositories, bandages, or any other formulation suitable for systemic, topical or local administration. For local internal administration, such as intramuscular, parenteral or intra-articular administration, the constructs and nucleic acids can be formulated as a solution suspension in an aqueous-based medium, such as isotonically buffered saline, or are combined with a biocompatible support or bioadhesive intended for internal administration. The effective concentration is sufficient for ameliorating the targeted condition and can be empirically determined. To formulate a composition, the weight fraction of compound is dissolved, suspended, dispersed, or otherwise mixed in a selected vehicle, at an effective concentration, such that the targeted condition is relieved or ameliorated.

[0936] Generally, pharmaceutically acceptable compositions are prepared in view of approvals for a regulatory agency, or other agency, and/or are prepared in accordance with generally recognized pharmacopeia for use in animals and in humans. Pharmaceutical compositions can include a carrier, such as a diluent, adjuvant, excipient, or vehicle, with which a polypeptide is administered. Such pharmaceutical carriers can be sterile liquids, such as water and oils, including those of petroleum, animal, vegetable or synthetic origin, such as peanut oil, soybean oil, mineral oil, and sesame oil. Water is a typical carrier when the pharmaceutical composition is administered intravenously. Saline solutions and aqueous dextrose and glycerol solutions also can be employed as liquid carriers, particularly for injectable solutions. Compositions can contain, along with an active ingredient, a diluent, such as lactose, sucrose, dicalcium phosphate, and carboxymethylcellulose; a lubricant, such as magnesium stearate, calcium stearate and talc; and a binder, such as starch, natural gums, such as gum acacia, gelatin, glucose, molasses, polyvinylpyrrolidone, celluloses and derivatives thereof, povidone, crospovidone, and other such binders known to those of skill in the art. Suitable pharmaceutical excipients include starch, glucose, lactose, sucrose, gelatin, malt, rice, flour, chalk, silica gel, sodium stearate, glycerol monostearate, talc, sodium chloride, dried skim milk, glycerol, propylene glycol, water, and ethanol. A composition, if desired, also can contain minor amounts of wetting or emulsifying agents, or pH buffering agents, for example, acetate, sodium citrate, cyclodextrin derivatives, sorbitan monolaurate, triethanolamine sodium acetate, triethanolamine oleate, and other such agents. These compositions can take the form of solutions, suspensions, emulsions, tablets, pills, capsules, powders, granules, and sustained release formulations. Capsules and cartridges of, e.g., gelatin, for use in an inhaler or insufflator, can be formulated containing a powder mix of a therapeutic compound and a suitable powder base, such as lactose or starch. A composition can be formulated as a suppository, with traditional binders and carriers, such as triglycerides. Oral formulations can include standard carriers, such as pharmaceutical grades of mannitol, lactose, starch, magnesium stearate, sodium saccharine, cellulose, magnesium carbonate, and other such agents. Preparations for oral administration also can be suitably formulated with protease inhibitors, such as a Bowman-Birk inhibitor, a conjugated Bowman-Birk inhibitor, aprotinin and camostat. Examples of suitable pharmaceutical carriers are described in “Remington's Pharmaceutical Sciences” by E. W. Martin. Such compositions will contain a therapeutically effective amount of the compound, generally in purified form, together with a suitable amount of carrier, so as to provide the compound in a form for proper administration to a subject or patient.

[0937] The pharmaceutical compositions provided herein can contain other additives, including, for example, antioxidants, preservatives, antimicrobial agents, analgesic agents, binders, disintegrants, colorings, diluents, excipients, extenders, glidants, solubilizers, stabilizers, tonicity agents, vehicles, viscosity agents, flavoring agents, emulsions, such as oil-in-water or water-in-oil emulsions, emulsifying and suspending agents, such as acacia, agar, alginic acid, sodium alginate, bentonite, carbomer, carrageenan, carboxymethylcellulose, cellulose, cholesterol, gelatin, hydroxyethyl cellulose, hydroxypropyl cellulose, hydroxypropyl methylcellulose, methylcellulose, octoxynol-9, oleyl alcohol, povidone, propylene glycol monostearate, sodium lauryl sulfate, sorbitan esters, stearyl alcohol, tragacanth, xanthan gum, and derivatives thereof, solvents, and miscellaneous ingredients, such as crystalline cellulose, microcrystalline cellulose, citric acid, dextrin, dextrose, liquid glucose, lactic acid, lactose, magnesium chloride, potassium metaphosphate, and starch, among others (see, generally, Alfonso R. Gennaro (2000) Remington: The Science and Practice of Pharmacy, 20th Edition. Baltimore, MD: Lippincott Williams & Wilkins). Such carriers and/or additives can be formulated by conventional methods and can be administered to the subject at a suitable dose. Stabilizing agents, such as lipids, nuclease inhibitors, polymers, and chelating agents, can preserve the compositions from degradation within the body.

[0938] The formulation should suit the mode of administration. For example, the active compound can be formulated for parenteral administration by injection (e.g., by bolus injection, or continuous infusion). The injectable compositions can take such forms as suspensions, solutions or emulsions in oily or aqueous vehicles. The sterile injectable preparation also can be a sterile injectable solution, or a suspension in a non-toxic parenterally-acceptable diluent or solvent, for example, as a solution in 1,4-butanediol. Sterile, fixed oils are conventionally employed as a solvent or suspending medium. For this purpose, any bland fixed oil can be employed, including, but not limited to, synthetic mono- or diglycerides, fatty acids (including oleic acid), naturally occurring vegetable oils, such as sesame oil, coconut oil, peanut oil, cottonseed oil, and other oils, or synthetic fatty vehicles like ethyl oleate. Buffers, preservatives, antioxidants, and the suitable ingredients, can be incorporated as required, or, alternatively, can comprise the formulation.

[0939] The active compound, such as the constructs and nucleic acids provided herein, can be formulated as the sole pharmaceutically active ingredient in the composition, or can be combined with other active ingredients. The active compound can be targeted for delivery, such as by conjugation to a targeting agent, such as an antibody. Liposomal suspensions, including tissue-targeted liposomes, also can be suitable as pharmaceutically acceptable carriers. These can be prepared according to methods known to those skilled in the art. For example, liposome formulations can be prepared by methods well known to those of skill in the art, such as those as described in U.S. Pat. No. 4,522,811. Liposomal delivery also can include slow release formulations, including pharmaceutical matrices, such as collagen gels and liposomes modified with fibronectin (see, e.g., Weiner et al. (1985) J. Pharm. Sci. 74(9):922-925). The compositions provided herein further can contain one or more adjuvants that facilitate delivery, such as, but not limited to, inert carriers, or colloidal dispersion systems. Representative and non-limiting examples of such inert carriers can be selected from water, isopropyl alcohol, gaseous fluorocarbons, ethyl alcohol, polyvinylpyrrolidone, propylene glycol, a gel-producing material, stearyl alcohol, stearic acid, spermaceti, sorbitan monooleate, methylcellulose, as well as suitable combinations of two or more thereof.

[0940] The active compound is included in the pharmaceutically acceptable carrier in an amount sufficient to exert a therapeutically useful effect in the absence of undesirable side effects on the subject treated. The therapeutically effective concentration can be determined empirically by testing the compounds in known in vitro and in vivo systems, such as the assays described herein. Determination of a therapeutically effective amount is well within the capability of those skilled in the art. Therapeutically effective dosages can be determined by using in vitro and in vivo methods as described herein. Accordingly, an active compound, or mixtures thereof, provided herein, when in a pharmaceutical preparation, can be present in unit dose forms for administration.

2. Administration of the TNFR1 Antagonist Constructs, TNFR2 Agonist Constructs, the Multi-specific, such as Bi-Specific, Constructs and Nucleic acids

[0941] The active compounds, including the constructs provided herein, including the TNFR1 antagonist constructs, the TNFR2 agonist constructs, and multi-specific, such as bi-specific, TNFR1 antagonist/TNFR2 agonist constructs, including fusion proteins, and nucleic acid molecules encoding the constructs, can be administered by any suitable route. These include in vitro, ex vivo, or in vivo, by contacting a mixture, such as a body fluid or other tissue sample, with the active compound provided herein. For example, when administering a compound ex vivo, a body fluid, such as the vitreous, or tissue sample from a subject, can be contacted with the polypeptides that are coated on a tube or filter, such as, for example, a tube or filter in a bypass machine. When administering in vivo, the active compounds can be administered by any appropriate route, for example, orally, nasally, pulmonary, parenterally, intravenously, intradermally, intravitreally, intraretinally, subretinally, periocularly, subcutaneously, intraarticularly, intracisternally, intraocularly, intraventricularly, intrathecally, intramuscularly, intraperitoneally, intratracheally, rectally, or topically, or by direct injection into an organ, as well as by any combination of any two or more thereof, in liquid, semi-liquid or solid form, and are formulated in a manner suitable for each route of administration.

[0942] The route of administration is in accord with known methods, e.g., injection or infusion by intravenous, intraperitoneal, intracerebral, intramuscular, subcutaneous, intraocular, intraarterial, intrathecal, inhalation or intralesional routes, topical, or by sustained release systems. The antibody or fragment thereof is typically administered continuously by infusion or by bolus injection. The active compounds provided herein can be prepared in a mixture with a pharmaceutically acceptable carrier, as discussed above. Techniques for formulation and administration of the compounds are known to one of skill in the art. This therapeutic composition can be administered intravenously or through the nose or lung, such as, as a liquid or powder aerosol (lyophilized). The composition also can be administered parenterally or subcutaneously as desired. When administered systematically, the therapeutic composition should be sterile, pyrogen-free, and in a parenterally acceptable solution having due regard for pH, isotonicity, and stability, and other conditions known to those skilled in the art.

[0943] Therapeutic formulations can be administered in many conventional dosage formulations. Dosage formulations of the active compounds provided herein are prepared for storage or administration by mixing the compound having the desired degree of purity with physiologically acceptable carriers, excipients, or stabilizers. Such materials are non-toxic to the recipients at the dosages and concentrations employed, and can include buffers such as TRIS HCl, phosphate, citrate, acetate and other organic acid salts; antioxidants such as ascorbic acid; low molecular weight (less than about ten residues) peptides such as polyarginine; proteins, such as serum albumin, gelatin, or immunoglobulins; hydrophilic polymers, such as polyvinylpyrrolidone; amino acids, such as glycine, glutamic acid, aspartic acid, or arginine; monosaccharides, disaccharides, and other carbohydrates, including cellulose or its derivatives, glucose, mannose, or dextrins; chelating agents, such as EDTA; sugar alcohols, such as mannitol or sorbitol; counter ions, such as sodium and/or nonionic surfactants, such as those sold under the trademarks TWEEN and PLURONICS, and polyethylene glycol (PEG).

[0944] Pharmaceutical compositions can contain a stabilizing agent. The stabilizing agent can be an amino acid, amino acid derivative, amine, sugar, polyols, salts or surfactants. In some examples, the stable co-formulations contain a single stabilizing agent. In other examples, the stable co-formulations contain 2, 3, 4, 5 or 6 different stabilizing agents. For example, the stabilizing agent can be a sugar or polyol, such as a glycerol, sorbitol, mannitol, inositol, sucrose or trehalose. In particular examples, the stabilizing agent is sucrose. In other examples, the stabilizing agent is trehalose. The concentration of the sugar or polyol is from or from about 100 mM to 500 mM, 100 mM to 400 mM, 100 mM to 300 mM, 100 mM to 200 mM, 200 mM to 500 mM, 200 mM to 400 mM, 200 mM to 300 mM, 250 mM to 500 mM, 250 mM to 400 mM, 250 mM to 300 mM, 300 mM to 500 mM, 300 mM to 400 mM, or 400 mM to 500 mM, each inclusive.

[0945] In examples, the stabilizing agent can be a surfactant that is a polypropylene glycol, polyethylene glycol, glycerin, sorbitol, poloxamer and polysorbate. For example, the surfactant can be a polypropylene glycol, polyethylene glycol, glycerin, sorbitol, poloxamer or polysorbate, such as a poloxamer 188, polysorbate 20 and polysorbate 80. In particular examples, the stabilizing agent is polysorbate 80. The concentration of surfactant, as a % of mass concentration (w/v) in the formulation, is between or about between 0.005% to 1.0%, 0.01% to 0.5%, 0.01% to 0.1%, 0.01% to 0.05%, or 0.01% to 0.02%, each inclusive.

[0946] For in vivo administration, the formulation should be sterile. This readily is accomplished, such as by filtration through sterile filtration membranes, prior to, or following lyophilization and reconstitution. The formulation can be stored in lyophilized form or in solution. Other vehicles, such as naturally occurring vegetable oil, such as sesame, peanut, or cottonseed oil, or a synthetic fatty vehicle, such as ethyl oleate, or the like, can be used. Buffers, preservatives, antioxidants and the like can be incorporated according to accepted pharmaceutical practice.

[0947] Determination of dosage is within the skill of the physician, and can be a function of the particular disorder, route of administration and subject. Exemplary dosages, include for example 0.1 to 100 mg/kg, such as 1 to 10 mg/kg, or an appropriate amount based on the mass of the treated subject; average human subjects have a mass of about 70-75 kg. The polypeptides can be administered once or more than once, such as twice, three times, four times, or any number of times that are required to achieve a therapeutic effect. Multiple administrations can be effected via any route or combination of routes, and can be administered hourly, every 2 hours, every three hours, every four hours or more.

[0948] The active compounds can be provided at a concentration in the composition of, for example, from or from about 0.1 to 10 mg/mL, such as, for example, a concentration that is at least or at least about 0.1, 0.2, 0.3, 0.4, 0.5, 0.6, 0.7, 0.8, 0.9, 1.0, 1.5, 2.0, 2.5, 3.0, 3.5, 4.0, 4.5, 5.0, 5.5, 6.0, 6.5, 7.0, 7.5, 8.0, 8.5, 9.0, 9.5, or 10 mg/mL, or more. The volume of the solution can be at or about 0.1 to 100 mL or more, such as, for example, at least or about at least or 0.5, 1, 2, 3, 4, 5, 10, 15, 20, 25, 30, 35, 40, 45, 50, 55, 60, 65, 70, 75, 80, 85, 90, 95, or 100 mL, or more. In some examples, the active compound is supplied in phosphate buffered saline. For example, the compositions can be supplied as a 50 mL, vial or other container containing 100 mg of polypeptide or fusion protein at a concentration of 2 mg/mL in phosphate buffered saline.

[0949] Active compounds provided herein, can be lyophilized for storage and reconstituted in a suitable carrier prior to use. This technique has been shown to be effective with conventional immunoglobulins and protein preparations, and art-known lyophilization and reconstitution techniques can be employed.

[0950] The active compounds provided herein, can be provided as a controlled release or sustained release composition. Polymeric materials are known in the art for the formulation of pills and capsules which can achieve controlled or sustained release (see e.g., Controlled Drug Bioavailability, Drug Product Design and Performance, Smolen and Ball (eds.), Wiley, New York (1984); see, also, Levy et al. (1985) Science 228:190; During et al. (1989) Ann. Neurol. 25:351; Howard et al. (1989) J. Neurosurg. 71:105; U.S. Pat. Nos. 5,679,377, 5,916,597, 5,912,015, 5,989,463, and 5,128,326; and International Application Publication Nos. WO 99/015154 and WO 99/020253). Examples of polymers used in sustained release formulations include, but are not limited to, poly(2-hydroxy ethyl methacrylate), poly(methyl methacrylate), poly(acrylic acid), poly(ethylene-co-vinyl acetate), poly(methacrylic acid), polyglycolides (PLG), polyanhydrides, poly(N-vinyl pyrrolidone), poly(vinyl alcohol), polyacrylamide, poly(ethylene glycol), polylactides (PLA), poly(lactide-co-glycolides) (PLGA), and polyorthoesters. Generally, the polymer used in a sustained release formulation is inert, free of leachable impurities, stable on storage, sterile, and biodegradable. Any technique known in the art for the production of sustained release formulations can be used to produce a sustained release formulation.

[0951] The constructs and nucleic acids, and physiologically acceptable forms thereof salts and solvates, can be formulated for administration by inhalation (either through the mouth or the nose), or other routes of administration, including, for example, oral, transdermal, pulmonary, parenteral or rectal administration. For administration by inhalation, the active compounds can be delivered in the form of an aerosol spray presentation from pressurized packs or a nebulizer with the use of a suitable propellant, e.g., dichlorodifluoromethane, trichlorofluoromethane, dichlorotetrafluoroethane, carbon dioxide, or other suitable gas. In the case of a pressurized aerosol, the dosage unit can be determined by providing a valve to deliver a metered amount. Capsules and cartridges of, for example, gelatin, for use in an inhaler or insufflator, can be formulated containing a powder mix of a therapeutic compound and a suitable powder base, such as lactose or starch.

[0952] For pulmonary administration to the lungs, the constructs can be delivered in the form of an aerosol spray presentation from a nebulizer, turbo nebulizer, or microprocessor-controlled metered dose oral inhaler, with the use of a suitable propellant. Generally, particle size of the aerosol is small, such as in the range of 0.5 to 5 microns. In the case of a pharmaceutical composition formulated for pulmonary administration, detergent surfactants are not typically used. Pulmonary drug delivery is a promising non-invasive method of systemic administration. The lungs represent an attractive route for drug delivery, mainly due to the high surface area for absorption, thin alveolar epithelium, extensive vascularization, lack of hepatic first-pass metabolism, and relatively low metabolic activity.

[0953] For oral administration, the pharmaceutical compositions can take the form of, for example, tablets, pills, liquid suspensions, or capsules prepared by conventional means with pharmaceutically acceptable excipients such as binding agents (e.g., pregelatinized maize starch, polyvinylpyrrolidone or hydroxypropyl methylcellulose); fillers (e.g., lactose, microcrystalline cellulose or calcium hydrogen phosphate); lubricants (e.g., magnesium stearate, talc or silica); disintegrants (e.g., potato starch or sodium starch glycolate); or wetting agents (e.g., sodium lauryl sulfate). The tablets can be coated by methods well known in the art. Liquid preparations for oral administration can take the form of, for example, solutions, syrups or suspensions, or they can be presented as a dry product for constitution with water or other suitable vehicle before use. Such liquid preparations can be prepared by conventional means with pharmaceutically acceptable additives, such as suspending agents (e.g., sorbitol syrup, cellulose derivatives or hydrogenated edible fats); emulsifying agents (e.g., lecithin or acacia); non-aqueous vehicles (e.g., almond oil, oily esters, ethyl alcohol, or fractionated vegetable oils); and preservatives (e.g., methyl or propyl-p-hydroxybenzoates, or sorbic acid). The preparations also can contain buffer salts, flavoring, coloring, and sweetening agents, as appropriate.

[0954] Preparations for oral administration can be formulated for controlled release of the active compound. For buccal administration, the compositions can take the form of tablets or lozenges formulated in a conventional manner. The active compounds can be formulated as a depot preparation. Such long-acting formulations can be administered by implantation (for example, subcutaneously or intramuscularly), or by intramuscular injection. Thus, for example, the therapeutic compounds can be formulated with suitable polymeric or hydrophobic materials (for example, as an emulsion in an acceptable oil) or ion exchange resins, or as sparingly soluble derivatives, for example, as a sparingly soluble salt.

[0955] The active compounds can be formulated for parenteral administration by injection (e.g., by bolus injection or continuous infusion). Formulations for injection can be presented in unit dosage form (e.g., in ampoules or in multi-dose containers) with an added preservative. The compositions can take such forms as suspensions, solutions or emulsions in oily or aqueous vehicles, and can contain formulatory agents, such as suspending, stabilizing and/or dispersing agents. Alternatively, the active ingredient can be in powder-lyophilized form for constitution with a suitable vehicle, e.g., sterile pyrogen-free water, before use.

[0956] The pharmaceutical compositions can be formulated for local or topical application, such as for topical application to the skin (transdermal) and mucous membranes, such as in the eye, in the form of gels, creams, and lotions, and for application to the eye or for intracisternal or intraspinal application. Such solutions, particularly those intended for ophthalmic use, can be formulated as 0.01%-10% isotonic solutions and a pH of about 5-7 with appropriate salts. The compounds can be formulated as aerosols for topical application, such as by inhalation (see, for example, U.S. Pat. Nos. 4,044,126, 4,414,209 and 4,364,923, which describe aerosols for delivery of a steroid useful for treatment of inflammatory diseases, particularly asthma).

[0957] The concentration of active compound in the drug composition depends on absorption, inactivation and excretion rates of the active compound, the dosage schedule, and amount administered as well as other factors known to those of skill in the art. As described further herein, dosages can be determined empirically using comparisons of properties and activities. For example, inhibition of TNF-mediated inflammatory signaling via TNFR1 by the constructs provided herein can be compared to traditional anti-TNF therapies, such as adalimumab.

[0958] The compositions, if desired, can be presented in a package, in a kit or dispenser device, that can contain one or more unit dosage forms containing the active ingredient. In some examples, the composition can be coated on a device, such as for example on a tube or filter in, for example, a bypass machine. The package, for example, contains metal or plastic foil, such as a blister pack. The pack or dispenser device can be accompanied by instructions for administration. The compositions containing the active agents can be packaged as articles of manufacture containing packaging material, an agent provided herein, and a label that indicates the disorder for which the agent is provided. The pharmaceutical compositions can be packaged in unit dosage forms containing an amount of the pharmaceutical composition for a single dose or multiple doses. The packaged compositions can contain a lyophilized powder of the pharmaceutical compositions containing the constructs provided herein, including the TNFR1 antagonist constructs, the TNFR2 agonist constructs, and multi-specific, such as bi-specific, TNFR1 antagonist/TNFR2 agonist constructs, including fusion proteins, and nucleic acid molecules encoding the constructs provided herein, which can be reconstituted (e.g., with water or saline) prior to administration.

[0959] The articles of manufacture provided herein contain packaging materials. Packaging materials for use in packaging pharmaceutical products are well-known to those of skill in the art (see, e.g., U.S. Pat. Nos. 5,323,907, 5,052,558 and 5,033,252). Examples of pharmaceutical packaging materials include, but are not limited to, blister packs, bottles, tubes, inhalers (e.g., pressurized metered dose inhalers (MDI), dry powder inhalers (DPI), nebulizers (e.g., jet or ultrasonic nebulizers) and other single breath liquid systems), pumps, bags, vials, containers, syringes, bottles, and any packaging material suitable for a selected formulation and intended mode of administration and treatment.

[0960] The active compounds, including the constructs provided herein, including the TNFR1 antagonist constructs, the TNFR2 agonist constructs, and multi-specific, such as bi-specific, TNFR1 antagonist/TNFR2 agonist constructs, including fusion proteins, and nucleic acid molecules encoding the constructs, the pharmaceutical compositions, and combinations of the active agents and other compositions, including other therapeutic agents, can be provided as kits. Kits can optionally include one or more components, such as instructions for use, devices, additional reagents (e.g., sterilized water or saline solutions for dilution of the compositions and/or reconstitution of lyophilized protein), and components, such as tubes, containers and syringes, for practice of the methods. Exemplary kits can include the constructs and encoding nucleic acids provided herein, and optionally can include instructions for use, a device for administering the compounds to a subject, a device for detecting the compounds in a subject, a device or devices for detecting the compounds or metabolites thereof in samples obtained from a subject, and a device for administering an additional therapeutic agent to a subject. The kit, optionally, can include instructions for use. Instructions typically include a tangible expression describing the active compound(s), and, optionally, other components included in the kit, and methods for administration, including methods for determining the proper state of the subject, the proper dosage amount, dosing regimens, and administration methods. Instructions also can include guidance for monitoring the subject over the duration of the treatment time.

[0961] Kits also can include a pharmaceutical composition described herein and an item for diagnosis. For example, such kits can include an item for measuring the concentration, amount or activity of the administered active compound in a subject. Kits provided herein also can include a devices for administering the compound(s). Any of a variety of devices known in the art for administering medications to a subject can be included in the kits provided herein. Exemplary devices include, but are not limited to, a hypodermic needle, an intravenous needle, and a catheter. Typically, a device for administering is compatible with the desired method of administration of the active agent.

### 3. Administration of Nucleic Acids Encoding Polypeptides (Gene Therapy)

[0962] Among the pharmaceutical compositions are those containing nucleic acid molecules that encode the polypeptide constructs provided herein. Rather than deliver the protein, nucleic acid molecules can be administered in vivo, such as systemically or by other route, or ex vivo, such as by removal of cells, including lymphocytes, introduction of the nucleic acid molecule therein, and reintroduction into the host or a compatible recipient.

[0963] The polypeptide constructs provided herein, including the TNFR1 antagonist constructs, the TNFR2 agonist constructs, and multi-specific, such as bi-specific, TNFR1 antagonist/TNFR2 agonist constructs, including fusion proteins, can be delivered to cells and tissues by expression of nucleic acid molecules. Nucleic acids can be delivered to cells and tissues by any method known to those of skill in the art. The isolated nucleic acid can be incorporated into vectors for further manipulation. As discussed above, methods for administering the polypeptides by expression of encoding nucleic acid molecules include administration of recombinant vectors. The vector can be designed to remain episomal, such as by inclusion of an origin of replication, or can be designed to integrate into a chromosome in the cell. The polypeptides also can be used in ex vivo gene expression therapy using non-viral vectors. Suitable gene therapy vectors and methods of delivery are known to those of skill in the art, and are discussed in sections above.

### J. Therapeutic Uses and Methods of Treatment

[0964] Pharmaceutical compositions, such as those described above, are prepared and are administered to subjects with a disease, disorder, or condition amenable to treatment with a construct that inhibits and/or agonizes TNFR1 and TNFR2, respectively. Dosage depends upon the particular disorder, disease or condition that is treated, as well as the particular subject. Typical doses are similar to known TNF blockers, such as etanercept. Exemplary doses, for a subject, including humans and other animals, range from about or 0.1 mg/kg to 100 mg/kg, such as 1 mg/kg to about or 30 mg/kg, such as 5 mg/kg to 25 mg/kg. Dose can be determined based on the assumption that an average human has a mass of about 75 kg. Doses can be adjusted for children, infants, and smaller adults.

[0965] The TNFR1 antagonists, TNFR2 agonists, bi-specific TNFR1 antagonist/TNFR2 agonist constructs and fusion proteins provided herein can be used for any purpose known to the skilled artisan for use of such molecules, including for treatment of any diseases, disorders, and conditions described herein. For example, the TNFR1 antagonists, TNFR2 agonists, multi-specific TNFR1 antagonist/TNFR2 agonist constructs, and fusion proteins provided herein can be used for one or more of therapeutic, diagnostic, industrial and/or research purpose(s). Methods of treatment provided herein include methods for the therapeutic uses of the TNFR1 antagonists, TNFR2 agonists, multi-specific TNFR1 antagonist/TNFR2 agonist constructs and fusion proteins provided herein. For example, the TNFR1 antagonists described herein can be used to antagonize TNFR1, and/or to inhibit the binding of TNF to TNFR1, and/or to inhibit TNF-mediated pro-inflammatory signaling through TNFR1. The TNFR2 agonists can be used to agonize TNFR2, in order to induce protective/anti-inflammatory TNFR2 signaling, and/or induce the expansion, proliferation and activation of immunosuppressive TNFR2⁺regulatory T-cells (Tregs). In some embodiments, as described herein, the combination of the TNFR1 antagonists and TNFR2 agonists, or the use of the bi-specific TNFR1 antagonist/TNFR2 agonist constructs provided herein, provides for the selective inhibition of pro-inflammatory TNFR1 activity, while maintaining or increasing TNFR2-associated protective signaling and Treg immunosuppressive activity, which is beneficial in the treatment of chronic inflammatory and autoimmune diseases, as well as in the treatment of neurodegenerative and demyelinating diseases and disorders.

[0966] The TNFR1 antagonists, TNFR2 agonists, multi-specific, such as bi-specific, TNFR1 antagonist/TNFR2 agonist constructs and fusion proteins provided herein can have therapeutic activity alone, or in combination with other agents. TNFR1 antagonists, TNFR2 agonists, bi-specific TNFR1 antagonist/TNFR2 agonist constructs and fusion proteins, and the encoding nucleic acid molecules, provided herein, can be used for the treatment of any condition for which anti-TNF therapies (e.g., adalimumab, infliximab, etanercept, and others described herein and/or known in the art), or other disease-modifying anti-rheumatic drugs (DMARDs; e.g., methotrexate, hydroxychloroquine, sulfasalazine, leflunomide, abatacept, anakinra, rituximab, tocilizumab, tofacitinib, and others described herein and/or known in the art) are employed, including, but not limited to, chronic inflammatory and autoimmune diseases and disorders, as well as neurodegenerative and demyelinating diseases and disorders. For example, the subject to whom the therapeutic molecules provided herein are administered exhibits acute or chronic inflammation of the joints, skin, lungs, and/or gut, and/or suffers from autoimmune diseases, rheumatoid arthritis (RA), psoriasis, psoriatic arthritis, juvenile idiopathic arthritis (JIA), spondyloarthritis, ankylosing spondylitis, Crohn's disease, ulcerative colitis, inflammatory bowel disease (IBD), uveitis, fibrotic diseases, endometriosis, lupus, multiple sclerosis, congestive heart failure, cardiovascular disease, myocardial infarction (MI), atherosclerosis, metabolic diseases, cytokine release syndrome, septic shock, sepsis, acute respiratory distress syndrome (ARDS), severe acute respiratory syndrome (SARS), COVID-19, influenza, acute and chronic neurodegenerative diseases, demyelinating diseases and disorders, stroke, Alzheimer's disease, Parkinson's disease, Behget's disease, Dupuytren's disease, Tumor Necrosis Factor Receptor-Associated Periodic Syndrome (TRAPS), pancreatitis, type I diabetes, chronic obstructive pulmonary disease (COPD), chronic bronchitis, emphysema, graft rejection, graft versus host disease (GvHD), respiratory diseases, lung inflammation, pulmonary diseases and conditions, asthma, cystic fibrosis, idiopathic pulmonary fibrosis, acute fulminant viral or bacterial infections, pneumonia, genetically inherited diseases with TNF/TNFR1 as the causative pathologic mediator, periodic fever syndrome, and cancer.

[0967] The constructs provided herein, when administered, generally can result in subjects exhibiting reduced or lessened side effects, compared to side effects that can be observed after administration of anti-TNF therapies. Treatment of diseases and conditions with the polypeptides provided herein, such as the TNFR1 antagonists, TNFR2 agonists, and the bi-specific constructs and fusion proteins thereof, can be effected by any suitable route of administration, using suitable formulations as described herein, including, but not limited to, infusion, subcutaneous injection, and inhalation, or intramuscular, intradermal, oral, topical and transdermal administration.

[0968] As discussed elsewhere herein, existing anti-TNF therapies, such as adalimumab, are immunosuppressive, due to the blockade of TNF signaling via TNFR1 and TNFR2, and are associated with a risk of adverse side effects, including, for example, an increased risk of sepsis and serious infections, such as listeriosis, reactivation of tuberculosis, reactivation of hepatitis B/C, reactivation of herpes zoster, and invasive fungal and other opportunistic infections. Anti-TNF agents also can cause worsening of severe congestive heart failure, and can cause drug-induced lupus, liver injury, psoriasis, sarcoidosis, and demyelinating central nervous system (CNS) diseases, and an increased susceptibility to the development of additional autoimmune diseases, as well as lymphomas and solid malignancies, such as non-melanoma skin cancers. Depending on the anti-TNF agent, about 3-33% of treated patients do not respond to treatment, and up to 46% stop responding, resulting in discontinuation or dose increase. Anti-TNF therapies have failed in the treatment of neurodegenerative diseases and CNS conditions, such as Alzheimer's disease, Parkinson's disease, stroke and multiple sclerosis (MS), which have been associated with the overexpression of TNF. Due to the adverse effects associated with the use of anti-TNF agents, the non-responsiveness of some patients, the lack of a sustained response in patients that had an initial response, and the failure to treat and/or the exacerbation of neurodegenerative diseases, such as MS, other therapies are needed. Such therapies are provided herein.

[0969] As described herein, the selective inhibition of TNFR1 retains the potent anti-inflammatory and protective activity of TNFR2 signaling, results in fewer opportunistic infections and cancer, and preserves TNF-induced Treg functions. Prior selective TNFR1 antagonists suffer from immunogenicity, including the formation of anti-drug antibodies (ADAs), poor pharmacokinetics and pharmacodynamics, including, for example, short serum half-life, rapid renal clearance, and/or poor binding affinity and potency. The therapies provided herein overcome the limitations associated with prior selective TNFR1 antagonists. Examples of therapeutic improvements using the polypeptides provided herein, such as the TNFR1 antagonists, include, but are not limited to, lower dosages, fewer and/or less frequent administrations, decreased side effects and increased therapeutic effects.

[0970] Hence, the selective TNFR1 antagonists, TNFR2 agonists, and multi-specific, such as bi-specific TNFR1 antagonist/TNFR2 agonist constructs, and fusion proteins, provided herein, are associated with reduced side effects, can be used, if necessary, at higher dosing regimens, and can have improved efficacy and safety. Side effects that can be reduced, lessened or eliminated, compared to those observed by existing anti-TNF therapeutics, such as adalimumab and others described herein and/or known in the art, include any undesirable non-therapeutic effect described herein or known in the art, such as, but not limited to, sepsis, serious infections, congestive heart failure/cardiotoxicity, generation of antibodies, and the development or worsening of cancer, autoimmune disease and/or demyelinating central nervous system (CNS) disease. In some examples, compared to side effects caused by administration of existing anti-TNF therapeutics, such as adalimumab, administration of a TNFR1 antagonist, bi-specific construct, or fusion protein provided herein decreases the severity of one or more side effects by at least or about 99%, at least or about 95%, at least or about 90%, at least or about 85%, at least or about 80%, at least or about 75%, at least or about 70%, at least or about 65%, at least or about 60%, at least or about 55%, at least or about 50%, at least or about 45%, at least or about 40%, at least or about 35%, at least or about 30%, at least or about 25%, at least or about 20%, at least or about 15%, or at least or about 10%, relative to the severity of the one or more side effects of an anti-TNF therapy.

[0971] Dosage levels and regimens can be determined based upon known dosages and regimens, and, if necessary can be extrapolated based upon the changes in properties of the polypeptides and constructs provided herein, and/or can be determined empirically based on a variety of factors. Such factors include, for example, the body weight of the individual, as well as their general health, age, sex, and diet, and the activity of the specific compound employed, the time of administration, the rate of excretion, drug combinations, the severity and course of the disease, and the patient's disposition to the disease and the judgment of the treating physician. The active ingredient typically is combined with a pharmaceutically effective carrier. The amount of active ingredient that can be combined with the carrier materials to produce a single dosage form or multi-dosage form can vary depending upon the host treated and the particular mode of administration.

[0972] Upon improvement of a patient's condition, a maintenance dose of a compound or composition can be administered, if necessary; and the dosage, the dosage form, or frequency of administration, or a combination thereof, can be modified. In some cases, a subject can require intermittent treatment on a long-term basis upon any recurrence of disease symptoms, or based upon scheduled dosages.

[0973] This section provides exemplary uses and administration methods for the constructs, include polypeptides and encoding nucleic acid molecules provided herein. These described therapies are exemplary only and do not limit the applications of the molecules/constructs provided herein. It is within the skill of a treating physician to identify diseases or conditions which are treatable using a TNFR1 antagonist, TNFR2 agonist, bi-specific TNFR1 antagonist/TNFR2 agonist construct, and fusion protein, as well as an encoding nucleic acid molecule, provided herein.

### 1. Treatment of Chronic Inflammatory/Autoimmune Diseases and Disorders

[0974] As described herein, elevated levels or uncontrolled expression of TNF, as well as deregulation of TNF signaling, can cause chronic inflammation, which can result in the development of autoimmune diseases and tissue damage. TNF signaling via TNFR1 is primarily pro-inflammatory, and drives the development of chronic inflammatory and autoimmune diseases and disorders. For example, TNFR1 signaling is associated with the development of arthritis, inflammatory bowel disease (IBD), and respiratory diseases, among others, as well as with the generation of osteoclasts which results in local bone destruction, and cardiotoxic effects in TNF-induced models of heart failure and myocardial infarction. Thus, the selective blockade of TNFR1 is useful in the treatment of chronic inflammatory and autoimmune diseases and conditions. TNF signaling via TNFR2, which primarily is anti-inflammatory, has been associated with neuro-, cardio-, gut- and osteo-protective effects. The anti-inflammatory and protective effects of TNFR2 signaling have been demonstrated in, for example, experimental colitis, heart failure/heart disease, myocardial infarction, inflammatory arthritis, infectious disease, pancreatic regeneration, stem cell proliferation, the destruction of autoreactive T-cells, and the regulation of osteoclastogenesis for maintaining bone mass, and protecting against joint inflammation and erosive destruction. TNFR2 agonism also results in the proliferation and expansion of immunosuppressive TNFR2⁺Tregs, and promotes Treg cell suppressive activity, which eliminates autoreactive/effector T-cells, prevents tissue destruction, and suppresses inflammatory and autoimmune diseases and conditions. TNFR2 agonism, thus, also can be used to treat or alleviate the symptoms of chronic inflammatory and autoimmune diseases and conditions.

[0975] The TNFR1 antagonists, TNFR2 agonists, multi-specific TNFR1 antagonist/TNFR2 agonist constructs, fusion proteins, and encoding nucleic acids provided herein can be used to treat or alleviate the symptoms of autoimmune/inflammatory diseases and disorders associated with elevated TNF levels and deregulated TNF signaling. The constructs, fusion proteins and nucleic acids, provided herein, can be used for treating diseases, disorders, and conditions, including, but not limited to, for example, arthritis (e.g., rheumatoid arthritis, psoriatic arthritis, juvenile idiopathic arthritis, spondyloarthritis), inflammatory bowel disease (e.g., Crohn's disease and ulcerative colitis), uveitis, fibrotic diseases (e.g., Dupuytren's disease), Behget's disease, endometriosis, lupus, ankylosing spondylitis, psoriasis, tumor necrosis factor receptor-associated periodic syndrome (TRAPS), cardiovascular disease, congestive heart failure, myocardial infarction (MI), atherosclerosis, respiratory diseases, asthma, cystic fibrosis, chronic obstructive pulmonary disease (COPD), pancreatitis, type I diabetes, metabolic diseases, cytokine release syndrome, septic shock, sepsis, acute respiratory distress syndrome (ARDS), severe acute respiratory syndrome (SARS), COVID-19, influenza, chronic bronchitis, emphysema, lung inflammation, idiopathic pulmonary fibrosis, graft rejection, graft versus host disease (GvHD), acute fulminant viral or bacterial infections, pneumonia, genetically inherited diseases with TNF/TNFR1 as the causative pathologic mediator, and periodic fever syndrome, among others.

[0976] The TNF blockade also can decrease a cytokine storm observed in some viral infections, such as from the SARS viruses and the infection COVID-19. This can prevent ventilator dependence, multiorgan damage, and death in patients with severe acute respiratory syndrome (SARS), such as that resulting from SARS-CoV-2 and other SARS viruses/coronaviruses. TNF-induced viral syndrome (TIVS) is induced by a TNF-driven cytokine storm that involves not only damage to the lungs, but also multiple organ failure. TIVS is analogous to SIRS (serious inflammatory respiratory syndrome), SARS (severe acute respiratory syndrome), and septicemia (caused by bacteria). These conditions impact lung function, but also many other organs. Severe acute respiratory syndrome coronavirus-2 (SARS-CoV-2, which causes COVID-19) gains access to host cells via angiotensin-converting enzyme, which is expressed in the type II surfactant-secreting alveolar cells of the lungs. Severe COVID-19 is associated with a major immune inflammatory response with abundant neutrophils, lymphocytes, macrophages, and immune mediators. Deaths from COVID-19 primarily result from diffuse alveolar damage with pulmonary edema, hyaline membrane formation, and interstitial mononuclear inflammatory infiltrate compatible with early-phase adult respiratory distress syndrome (ARDS). TNF is present in blood and disease tissues of patients with COVID-19; TNF is involved in almost all acute inflammatory reactions, acting as an amplifier of inflammation. Thus, treatments with the constructs herein are provided.

### 2. Treatment of Neurodegenerative and Demyelinating Diseases and Disorders

[0977] As discussed elsewhere herein, several neurodegenerative and demyelinating diseases and conditions are associated with chronically elevated levels of TNF in the central nervous system (CNS). Elevated levels of TNF, and TNF signaling via TNFR1, are implicated in initiating and maintaining neuroinflammation, and in promoting neuronal cell death, demyelination and cognitive decline. For example, in patients with Alzheimer's disease (AD), TNF promotes microglial activation, synaptic dysfunction, neuronal cell death, and accumulation of plaques and tangles, and, elevated levels of TNF inhibit phagocytosis of amyloid beta (A3) in the brains of AD patients, which hinders efficient plaque removal by microglia. In patients with Parkinson's disease (PD), elevated TNF levels result in neuroinflammation and dopaminergic neuron toxicity. Elevated levels of TNF, as well as polymorphisms in the gene encoding TNFR1, are linked to demyelination, and the development of demyelinating disorders, such as multiple sclerosis (MS). The selective blockade of TNF signaling via TNFR1, thus, can be used in the treatment or alleviation of neurodegenerative and demyelinating diseases and disorders, and other conditions of the CNS.

[0978] TNF signaling via TNFR2 is associated with anti-inflammatory and neuroprotective effects. For example, activation of TNFR2 by TNF inhibits seizures, attenuates cognitive dysfunction following brain injury, and promotes remyelination, as well as the survival of neurons. The proliferation, expansion and activation of immunosuppressive Tregs, following TNFR2 agonism, also has neuroprotective effects. For example, TNFR2 signaling promotes Treg cell expansion and suppressive activity in experimental autoimmune encephalomyelitis (EAE), an animal model of inflammatory CNS demyelinating disease, such as multiple sclerosis. TNFR2 agonism, thus, also can be used in the treatment or alleviation of neurodegenerative and demyelinating diseases and disorders, and other conditions of the CNS.

[0979] The TNFR1 antagonist constructs, TNFR2 agonist constructs, multi-specific, such as bi-specific, TNFR1 antagonist/TNFR2 agonist constructs, fusion proteins, and nucleic acids provided herein can be used to treat or ameliorate the symptoms of neurodegenerative and demyelinating diseases, and other CNS disorders and conditions, including, but not limited to, Alzheimer's disease, Parkinson's disease, multiple sclerosis, and stroke.

3. Treatment of Cancer and other Immunosuppressing Diseases, Disorders, and Conditions

[0980] As described herein, tumors are infiltrated by large numbers of immunosuppressive TNFR2⁺ Tregs, which prevent the proliferation of tumor-killing CD8⁺ cytotoxic T lymphocytes (CTLs) (also known as effector T-cells (Teffs)), allowing for tumor growth. Antagonism of TNFR2 on lymphocytes in the tumor microenvironment (TME) restores the balance between the two types of T-cells, by eliminating Tregs, and allowing for the activation and expansion of effector T-cells, resulting in tumor cell lysis (see, e.g., Vanamee et al. (2017) Trends in Molecular Medicine 23(11):P1037-P1046).

[0981] TNFR2 is abundantly expressed on the surfaces of many types of human cancer cells, including, for example, renal cell carcinoma, colon cancer, Hodgkin's lymphoma, multiple myeloma, cutaneous non-Hodgkin's lymphoma, and ovarian cancer. TNFR2 mutations in cancer are associated with gene duplications and constitutive activation. Murine myeloid-derived suppressor cells (MDSCs) also express TNFR2, and its inhibition has been shown to control metastasis in a murine liver cancer model. Additionally, immune checkpoint inhibitors result in the upregulation of TNFR2 on tumor-infiltrating Tregs, leading to tumor immune escape and drug resistance. Not all patients respond to therapy with immune checkpoint inhibitors, patients can relapse, and serious autoimmune side effects have been observed with checkpoint inhibitor therapy (see, e.g., Vanamee et al. (2017) Trends in Molecular Medicine 23(11):P1037-P1046). Thus, blockade of TNFR2 can be used for the treatment of certain types of cancers, by directly killing tumor cells, via the inhibition of immunosuppressive Tregs, which allows for the proliferation of effector T-cells, and by the inhibition of MDSCs, which can prevent the formation of metastases. Because TNFR2 also is expressed on normal tissues (especially macrophages; see, e.g., proteinatlas.org/ensg00000028137-tnfrsflb/tissue), the TNFR2 antagonist does not have ADCC activity, but does have FcRn activity (or enhanced FcRn activity). Administration is personalized, since, as described herein, to qualify for treatment, the patient's tumor must have a significantly higher level of TNFR2 than adjacent normal tissues. For this purpose, the TNFR2 antagonist will be used together with other therapies, especially immunomodulating treatments that otherwise lead to an accumulation of regulatory T-cells in the tumor.

[0982] The TNFR2 agonists, bi-specific TNFR1 antagonist/TNFR2 agonist constructs, and fusion proteins provided herein, thus, also can be used in the treatment of solid cancers, hematological malignancies, and other hyperproliferative diseases and disorders, including, but not limited to, for example, renal cell carcinoma, colon cancer, Hodgkin's lymphoma, multiple myeloma, cutaneous non-Hodgkin's lymphoma, and ovarian cancer.

### 4. Combination Therapies

[0983] Combination therapies include administration of the TNFR1 antagonist constructs, TNFR2 agonist constructs, multi-specific, such as bi-specific, TNFR1 antagonist/TNFR2 agonist constructs, fusion proteins, and nucleic acids provided herein, in combination with another agent or treatment, including radiation and surgery. The further agent or therapy can be administered concurrently, before, after, or intermittently with the treatments provided herein. They can be in separate compositions, or in co-formulations.

[0984] The TNFR1 antagonist constructs, TNFR2 agonist constructs, multi-specific, such as bi-specific, TNFR1 antagonist/TNFR2 agonist constructs, fusion proteins, and nucleic acids provided herein can be administered before, after, intermittently with, or concomitantly with, one or more other therapeutic regimens or agents, including, but not limited to, TNF antagonists/blockers, antibodies, cytotoxic agents, anti-inflammatory agents, cytokines, growth factors, growth inhibitory agents, cardioprotectants, immunosuppressive agents, chemotherapeutic agents, biologic or non-biologic disease-modifying anti-rheumatic drugs (DMARDs), treatments (including antibodies) for infectious diseases, or other therapeutic agents. The TNFR1 antagonist constructs, TNFR2 agonist constructs, multi-specific, such as bi-specific, TNFR1 antagonist/TNFR2 agonist constructs, and nucleic acids provided herein can be administered to the patient as a first-line treatment, or as a second-line therapy where anti-TNF therapeutics were not effective, either as acute or chronic treatments. Exemplary of anti-TNF therapies that can be used in combination therapies herein include, for example, conventional synthetic DMARDs, such as, for example (generic name and exemplary trademark): methotrexate (MTX), hydroxychloroquine (HCQ; Plaquenil®), sulfasalazine (Azulfidine®), and leflunomide (Arava®); biologic DMARDs, such as, for example, abatacept (Orencia®), anakinra (Kineret®), rituximab (Rituxan®, Truxima®, MabThera®), tocilizumab (atlizumab, Actemra®, RoActemra®), corticosteroids (e.g., dexamethasone, methylprednisolone, prednisolone, prednisone, or triamcinolone), tofacitinib (Xeljanz®), and TNF-inhibitors/anti-TNF agents, such as, for example, certolizumab pegol (Cimzia®), infliximab (Remicade®), adalimumab (Humira®), golimumab (Simponi®), and etanercept (Enbrel®). The combination therapy also can include immunotherapeutic drugs, such as, for example, cyclosporine, methotrexate, adriamycin or cisplatinum, and immunotoxins.

[0985] Examples of anti-inflammatory drugs and agents useful for combination therapies include non-steroidal anti-inflammatory drugs (NSAIDs), including salicylates, such as aspirin, traditional NSAIDs, such as ibuprofen, naproxen, ketroprofen, nabumetone, piroxicam, diclofenac, or indomethacin, and Cox-2 selective inhibitors, such as celecoxib (sold under the trademark Celebrex®), or Rotecoxin (sold under the trademark Vioxx®). Other compounds useful in combination therapies include antimetabolites, such as methotrexate and leflunomide; corticosteroids or other steroids, such as cortisone, dexamethasone, or prednisone; analgesics, such as acetaminophen; aminosalicylates, such as mesalamine; and cytotoxic agents, such as azathioprine (sold under the trademark Imuran®), cyclophosphamide (sold under the trademark Cytoxan®), and cyclosporine A.

[0986] Additional agents that can be used in combination therapies include biological response modifiers, including, for example, anti-inflammatory cytokines, such as IL-10; B-cell targeting agents, such as anti-CD20 antibodies (e.g., rituximab); compounds targeting T antigens; adhesion molecule blockers; chemokine receptor antagonists; kinase inhibitors, such as inhibitors of mitogen-activated protein (MAP) Kinase, c-Jun N-terminal Kinase (JNK), or NFκB; and peroxisome proliferator-activated receptor-gamma (PPAR-7) ligands. Additional agents that can be used in combination therapies include immunosuppressants. Immunosuppressants can include, for example, tacrolimus or FK-506; mycophenolic acid; calcineurin inhibitors (CNIs); CsA; and sirolimus, or other agents known to suppress the immune system.

[0987] The polypeptides and constructs provided herein also can be used in combination with agents that are administered to treat cardiovascular disease and/or administered during procedures to treat cardiovascular disease, such as, for example, anti-coagulants. Exemplary anti-coagulants include, but are not limited to, heparin, warfarin, acenocoumarol, phenindione, EDTA, citrate, oxalate, and direct thrombin inhibitors, such as argatroban, lepirudin, bivalirudin, and ximelagatran.

[0988] The polypeptides and constructs provided herein can be administered with an antibody for the treatment of autoimmune or inflammatory disease, transplant rejection, or GvHD. Examples of such antibodies include, but are not limited to, anti-α4β7 integrin antibodies, such as LDP-02; anti-beta2 integrin antibodies, such as LDP-O1; anti-complement (C5) antibodies such as, 5G1.1; anti-CD2 antibodies, such as BTI-322 and MEDI-507; anti-CD3 antibodies, such as OKT3 and SMART anti-CD3; anti-CD4 antibodies, such as IDEC-151, MDX-CD4 and OKT4A; anti-CD11a antibodies; anti-CD14 antibodies, such as IC14; anti-CD18 antibodies; anti-CD23 antibodies, such as IDEC 152; anti-CD25 antibodies, such as daclizumab; anti-CD40L antibodies, such as 5c8, ruplizumab and IDEC-131; anti-CD64 antibodies, such as MDX-33; anti-CD80 antibodies, such as IDEC-114; anti-CD147 antibodies, such as ABX-CBL; anti-E-selectin antibodies, such as CDP850; anti-gpIIb/IIIa antibodies, such as ReoPro®/Abcixima; anti-ICAM-3 antibodies, such as ICM3; anti-ICE antibodies, such as VX-740; anti-FcγR1 antibodies, such as MDX-33; anti-IgE antibodies, such as rhuMAb-E25; anti-IL-4 antibodies, such as SB-240683; anti-IL-5 antibodies, such as SB-240563 and SCH55700; anti-IL-8 antibodies, such as ABX-IL8; anti-interferon gamma antibodies; anti-TNF-α antibodies, such as CDP571, CDP870, D2E7, Infliximab and MAK-195F; and anti-VLA-4 antibodies, such as Antegren®. Examples of other Fc-containing molecules that can be co-administered to treat autoimmune or inflammatory disease, transplant rejection and GvHD include, but are not limited to, the TNFR2-Fc fusion protein Enbrel® (etanercept), and Regeneron's IL-1 trap.

[0989] Examples of antibodies that can be co-administered to treat infectious diseases include, but are not limited to, anti-anthrax antibodies, such as ABthrax; anti-CMV antibodies, such as CytoGam and sevirumab; anti-cryptosporidium antibodies, such as CryptoGAM and Sporidin-G; anti-helicobacter antibodies, such as Pyloran; anti-hepatitis B antibodies, such as HepeX-B and Nabi-HB; anti-HIV antibodies, such as HRG-214; anti-RSV antibodies, such as felvizumab, HNK-20, palivizumab, and RespiGam; and anti-staphylococcus antibodies, such as Aurexis, Aurograb, BSYX-A110, and SE-Mab.

[0990] In some examples, the TNFR1 antagonist constructs, TNFR2 agonist constructs, multi-specific, such as bi-specific, TNFR1 antagonist/TNFR2 agonist constructs, fusion proteins, and nucleic acids provided herein are administered with one or more chemotherapeutic agents. Examples of chemotherapeutic agents include, but are not limited, to alkylating agents, such as thiotepa and cyclophosphamide (CYTOXAN®); alkyl sulfonates, such as busulfan, improsulfan and piposulfan; androgens, such as calusterone, dromostanolone propionate, epitiostanol, mepitiostane, and testolactone; anti-adrenals, such as aminoglutethimide, mitotane, and trilostane; anti-androgens, such as flutamide, nilutamide, bicalutamide, leuprolide, and goserelin; antibiotics, such as aclacinomycins, actinomycin, anthramycin, azaserine, bleomycins, cactinomycin, calicheamicin, carubicin, carminomycin, carzinophilin, chromomycins, dactinomycin, daunorubicin, detorubicin, 6-diazo-5-oxo-L-norleucine, doxorubicin, epirubicin, esorubicin, idarubicin, marcellomycin, mitomycins, mycophenolic acid, nogalamycin, olivomycins, peplomycin, porfiromycin, puromycin, quelamycin, rodorubicin, streptonigrin, streptozocin, tubercidin, ubenimex, zinostatin, and zorubicin; anti estrogens, including, for example, tamoxifen, raloxifene, aromatase inhibiting 4(5)-imidazoles, 4-hydroxytamoxifen, trioxifene, keoxifene, LY 117018, onapristone, and toremifene (Fareston); anti-metabolites, such as methotrexate and 5-fluorouracil (5-FU); folic acid analogs, such as denopterin, methotrexate, pteropterin, and trimetrexate; aziridines, such as benzodepa, carboquone, meturedepa, and uredepa; ethylenimines and methylmelamines, including altretamine, triethylenemelamine, triethylenephosphoramide, triethylenethiophosphoramide and trimethylol melamine; folic acid replenishers, such as folinic acid; nitrogen mustards, such as chlorambucil, chlornaphazine, chlorophosphamide, estramustine, ifosfamide, mechlorethamine, mechlorethamine oxide hydrochloride, melphalan, novembichin, phenesterine, prednimustine, trofosfamide, and uracil mustard; nitrosoureas, such as carmustine, chlorozotocin, fotemustine, lomustine, nimustine, ranimustine; platinum analogs, such as cisplatin and carboplatin; vinblastine; platinum; proteins, such as arginine deiminase and asparaginase; purine analogs, such as fludarabine, 6-mercaptopurine, thiamiprine, and thioguanine; pyrimidine analogs, such as ancitabine, azacitidine, 6-azauridine, carmofur, cytarabine, dideoxyuridine, doxifluridine, enocitabine, floxuridine, and 5-FU; taxanes, such as paclitaxel (TAXOL®, Bristol-Myers Squibb Oncology, Princeton, N.J.) and docetaxel (TAXOTERE®, Rhone-Poulenc Rorer, Antony, France); topoisomerase inhibitors, such as RFS 2000; thymidylate synthase inhibitors, such as Tomudex; additional chemotherapeutics, including aceglatone; aldophosphamide glycoside; aminolevulinic acid; amsacrine; bestrabucil; bisantrene; edatrexate; defosfamide; demecolcine; diaziquone; difluoromethylornithine (DMFO); eflornithine; elliptinium acetate; etoglucid; gallium nitrate; hydroxyurea; lentinan; lonidamine; mitoguazone; mitoxantrone; mopidamol; nitracrine; pentostatin; phenamet; pirarubicin; podophyllinic acid; 2-ethylhydrazide; procarbazine; polysaccharide K (PSK, Krestin); razoxane; sizofiran; spirogermanium; tenuazonic acid; triaziquone; 2,2′, 2″-trichlorotriethylamine; urethan; vindesine; dacarbazine; mannomustine; mitobronitol; mitolactol; pipobroman; gacytosine; arabinoside (“Ara-C”); cyclophosphamide; thiotepa; chlorambucil; gemcitabine; 6-thioguanine; mercaptopurine; methotrexate; etoposide (VP-16); ifosfamide; mitomycin C; mitoxantrone; vincristine; vinorelbine; Navelbine; Novantrone; teniposide; daunomycin; aminopterin; Xeloda; ibandronate; CPT-11; retinoic acid; esperamycins; capecitabine; and topoisomerase inhibitors, such as irinotecan. Pharmaceutically acceptable salts, acids or derivatives of any of the above can also be used.

[0991] A chemotherapeutic agent can be administered as a prodrug. Examples of prodrugs that can be administered with a TNFR1 antagonist constructs, TNFR2 agonist constructs, multi-specific, such as bi-specific, TNFR1 antagonist/TNFR2 agonist constructs, fusion proteins, and nucleic acids provided herein include, but are not limited to, for example, phosphate-containing prodrugs, thiophosphate-containing prodrugs, sulfate-containing prodrugs, peptide-containing prodrugs, D-amino acid-modified prodrugs, glycosylated prodrugs, beta-lactam-containing prodrugs, optionally substituted phenoxy acetamide-containing prodrugs, or optionally substituted phenylacetamide-containing prodrugs, and 5-fluorocytosine and other 5-fluorouridine prodrugs which can be converted into the more active cytotoxic free drug. The TNFR1 antagonist constructs, TNFR2 agonist constructs, multi-specific, such as bi-specific, TNFR1 antagonist/TNFR2 agonist constructs can be provided as prodrugs by, for example, linking them to a targeting agent, which targets a particular tissue or locus of disease, with an in vivo a cleavable linker, whereby the active form of the construct is released.

[0992] In some examples, a TNFR1 antagonist constructs, TNFR2 agonist constructs, multi-specific, such as bi-specific, TNFR1 antagonist/TNFR2 agonist constructs, fusion proteins, and nucleic acids provided herein is administered with one or more antibiotics, including, but not limited to: aminoglycoside antibiotics (e.g., apramycin, arbekacin, bambermycins, butirosin, dibekacin, gentamicin, kanamycin, neomycin, netilmicin, paromomycin, ribostamycin, sisomicin, and spectinomycin), aminocyclitols (e.g., spectinomycin), amphenicol antibiotics (e.g., azidamfenicol, chloramphenicol, florfenicol, and thiamphenicol), ansamycin antibiotics (e.g., rifamide and rifampin), carbapenems (e.g., imipenem, meropenem, and panipenem); cephalosporins (e.g., cefaclor, cefadroxil, cefamandole, cefatrizine, cefazedone, cefozopran, cefpimizole, cefpiramide, cefpirome, cefprozil, cefuroxime, cefixime, cephalexin, and cephradine), cephamycins (e.g., cefbuperazone, cefoxitin, cefminox, cefmetazole, and cefotetan); lincosamides (e.g., clindamycin, and lincomycin); macrolide (e.g., azithromycin, brefeldin A, clarithromycin, erythromycin, roxithromycin, and tobramycin), monobactams (e.g., aztreonam, carumonam, and tigemonam); mupirocin; oxacephems (e.g., flomoxef, latamoxef, and moxalactam); penicillins (e.g., amdinocillin, amdinocillin pivoxil, amoxicillin, bacampicillin, benzylpenicillinic acid, benzylpenicillin sodium, epicillin, fenbenicillin, floxacillin, penamecillin, penethamate hydriodide, penicillin o-benethamine, penicillin 0, penicillin V, penicillin V benzoate, penicillin V hydrabamine, penimepicycline, and phenethicillin potassium); polypeptides (e.g., bacitracin, colistin, polymixin B, teicoplanin, and vancomycin); quinolones (e.g., amifloxacin, cinoxacin, ciprofloxacin, enoxacin, enrofloxacin, fleroxacin, flumequine, gatifloxacin, gemifloxacin, grepafloxacin, lomefloxacin, moxifloxacin, nalidixic acid, norfloxacin, ofloxacin, oxolinic acid, pefloxacin, pipemidic acid, rosoxacin, rufloxacin, sparfloxacin, temafloxacin, tosufloxacin, and trovafloxacin); rifampin; streptogramins (e.g., quinupristin, and dalfopristin); sulfonamides (e.g., sulfanilamide, and sulfamethoxazole); and tetracyclines (e.g., chlortetracycline, demeclocycline hydrochloride, demethylchlortetracycline, doxycycline, Duramycin, minocycline, neomycin, oxytetracycline, streptomycin, tetracycline, and vancomycin).

[0993] In some examples, the TNFR1 antagonist constructs, TNFR2 agonist constructs, multi-specific, such as bi-specific, TNFR1 antagonist/TNFR2 agonist constructs, fusion proteins, and nucleic acids provided herein can be administered with one or more anti-fungal agents, including, but not limited to, amphotericin B, ciclopirox, clotrimazole, econazole, fluconazole, flucytosine, itraconazole, ketoconazole, miconazole, nystatin, terbinafine, terconazole, and tioconazole. In some examples, a TNFR1 antagonist constructs, TNFR2 agonist constructs, multi-specific, such as bi-specific, TNFR1 antagonist/TNFR2 agonist constructs, and nucleic acids provided herein is administered with one or more antiviral agents, including, but not limited to, protease inhibitors, reverse transcriptase inhibitors, and others, including type I interferons, viral fusion inhibitors, neuraminidase inhibitors, acyclovir, adefovir, amantadine, amprenavir, clevudine, enfuvirtide, entecavir, foscarnet, ganciclovir, idoxuridine, indinavir, lopinavir, pleconaril, ribavirin, rimantadine, ritonavir, saquinavir, trifluridine, vidarabine, and zidovudine.

[0994] The TNFR1 antagonist constructs, TNFR2 agonist constructs, multi-specific, such as bi-specific, TNFR1 antagonist/TNFR2 agonist constructs, fusion proteins, and nucleic acids provided herein can be administered in combination with the constructs described below, and also with any of the therapeutic anti-TNF agents and treatments set forth below, for combination therapies with growth factor trap constructs.

[0995] Pharmaceutical compositions containing the TNFR1 antagonist constructs, TNFR2 agonist constructs, multi-specific, such as bi-specific, TNFR1 antagonist/TNFR2 agonist constructs, fusion proteins, and nucleic acids provided herein can be used to treat any diseases, disorders, and conditions described herein, or known to those of skill in the art. The diseases, disorders, and conditions include one or more chronic inflammatory, autoimmune, neurodegenerative or demyelinating diseases or conditions. Also provided are combinations of the polypeptides and constructs provided herein, and another treatment or compound, for treatment of a chronic inflammatory, autoimmune, neurodegenerative or demyelinating disease or condition. The TNFR1 antagonist constructs, TNFR2 agonist constructs, multi-specific, such as bi-specific, TNFR1 antagonist/TNFR2 agonist constructs, fusion proteins, and nucleic acids provided herein, and the additional agent(s) can be packaged as separate compositions for administration together, or sequentially, or intermittently. Alternatively, they can be provided as a single composition for administration, or as two compositions for administration as a single composition. The combinations can be packaged as kits, optionally with additional reagents, instructions for use, vials and other containers, syringes and other items for use for treatment.

### K. Examples

[0996] The following examples are included for illustrative purposes only and are not intended to limit the scope of the invention.

### Example 1

Expression and Evaluation of Candidate Univalent TNFR1 antagonist Molecules Expression and Purification of Anti-TNFR1 Molecules

[0997] Candidate univalent TNFR1 antagonist molecules are expressed in mammalian cells, under control of a CMV promoter, using the expression plasmid depicted in FIG. 1 (where TE19080L is the inserted fragment). For the expression of protein therapeutics, such as the constructs herein, mammalian cells, such as Chinese hamster ovary (CHO) or human embryonic kidney 293 (HEK293) cells, are used to provide post-translation modification, including glycosylation, which can be important for proper protein structure, function and activity. Expression in bacterial, yeast or insect cells results, either in no glycosylation (for bacterial cells), or in different glycosylation patterns compared to expression in mammalian cells (for yeast or insect cells). Expression in bacteria also can result in the contamination of the protein therapeutic with bacterial endotoxins, which can activate innate immune cells, complicate the analysis of cell-based assays, and lead to pyrogenic effects upon in vivo administration.

[0998] Expression plasmid construction, as well as transient and stable cell line expression is performed using the methods, such as those described in Vazquez-Lombardi et al. (2018) Nat. Protoc. 13(1):99-117. Five exemplary TNFR1 antagonist molecules are produced for initial evaluation. The TNFR1 antagonist molecules include an H398-derived scFv (SEQ ID NO:678), containing one V_{L} and one V_{H} domain of H398, linked together by a (GGGGS)₃ peptide linker; the TNFR1 antagonist domain antibody (dAb) DOM1 h-574-16 (SEQ ID NO:57); the TNFR1 antagonist dAb DOM1 h-549 (SEQ ID NO:58); a fusion protein (SEQ ID NO:704), containing the TNFR1 antagonist dAb DOM1 h-574-208 (SEQ ID NO:54) from DMS5541 (described elsewhere herein), fused to the anti-serum albumin dAb (albudAb) of DMS5541 (DOM7 h-11-3; SEQ ID NO:52) by a (GGGGS)₃ peptide linker; and a fusion protein (SEQ ID NO:705), containing the anti-TNFR1 dAb designated DOM1 h-131-206 (SEQ ID NO:59), fused to the anti-serum albumin dAb (albudAb or DOM7 h-11-3; SEQ ID NO:52) of DMS5541 by a (GGGGS)₃ peptide linker. The insertion of a (GGGGS)₃ linker in the H398 scFv, and in the DOM1 h-574-208 and DOM1 h-131-206 fusion proteins, provides more flexibility between the V_{H} and VL domains, and the two dAbs, respectively, and increases the stability and resistance to denaturation of the molecules, improving the manufacturing process. The sequences of each of these TNFR1 antagonist molecules is provided in Table 12, below, some with various linker sequences (see, also Enever et al., (2015) Protein Engineering, Design & Selection 28(3):59-66, which describes dAbs and modifications thereof that can be used for further modification and addition of linkers and modifiers).

TABLE 12

| | | SEQ |
|---|---|---|
| TNFR1 antagonist | | ID |
| Molecule | Sequence | NO. |
| H398-derived scFv | QVQLQESGAELARPGASVKLSCKASGYTFTDFYINWVKQRTG | 678 |
| | QGLEWIGEIYPYSGHAYYNEKFKAKATLTADKSSSTAFMQLNS | |
| | LTSEDSAVYFCVRWDFLDYWGQGTTLTVSSGGGGSGGGGSGG | |
| | GGSDIVMTQSPLSLPVSLGDQASISCRSSQSLLHSNGNTYLHWY | |
| | VQKPGQSPKLLIYTVSNRFSGVPDRFSGSGSGTDFTLKISRVEAE | |
| | DLGVYFCSQSTHVPYTFGGGTKLEIKR | |
| DOMIh-574-16 | EVQLLESGGGLVQPGGSLRLSCAASGFTFVKYSMGWVRQAPG | 57 |
| | KGPEWVSQISNTGDRTYYADSVKGRFTISRDNSKNTLYLQMNS | |
| | LRAEDTAVYYCAIYTGRWEPFDYWGQGTLVTVSS | |
| DOMIh-549 | EVQLLESGGGLVQPGGSLRLSCAASGFTFVDYEMHWVRQAPG | 58 |
| | KGLEWVSSISESGTTTYYADSVKGRFTISRDNSKNTLYLQMNSL | |
| | RAEDTAVYYCAKRRFSASTFDYWGQGTLVTVSS | |
| DOM1h-574-208 - | EVQLLESGGGLVQPGGSLRLSCAASGFTFDKYSMGWVRQAPG | 704 |
| albudAb fusion | KGLEWVSQISDTADRTYYAHAVKGRFTISRDNSKNTLYLQMNS | |
| protein | LRAEDTAVYYCAIYTGRWVPFEYWGQGTLVTVSSGGGGSGGG | |
| | GSGGGGSDIQMTQSPSSLSASVGDRVTITCRASRPIGTTLSWYQ | |
| | QKPGKAPKLLILWNSRLQSGVPSRFSGSGSGTDFTLTISSLQPED | |
| | FATYYCAQAGTHPTTFGQGTKVEIKR | |
| DOM1h-131-206 | EVQLLESGGGLVQPGGSLRLSCAASGFTFAHETMVWVRQAPG | 705 |
| dAb - albudAb | KGLEWVSHIPPDGQDPFYADSVKGRFTISRDNSKNTLYLQMNS | |
| fusion protein | LRAEDTAVYHCALLPKRGPWFDYWGQGTLVTVSSGGGGSGG | |
| | GGSGGGGSDIQMTQSPSSLSASVGDRVTITCRASRPIGTTLSWY | |
| | QQKPGKAPKLLILWNSRLQSGVPSRFSGSGSGTDFTLTISSLQPE | |
| | DFATYYCAQAGTHPTTFGQGTKVEIKR | |

[0999] Also provided are nanobodies and constructs containing nanobodies that comprise two heavy chains selected from among those set forth in any of SEQ ID NOs: 53-83 and 503-671, such as SEQ ID NOs: 57-59, and variants thereof having at least 9500, 9600, 970%, 980%, 990% sequence identity thereto. Constructs are provided that comprise identical heavy chains. Exemplary of these is the TNFR1 dAb designated DOM1h-131-206. Also provided are constructs containing any of these dAbs, such as those that are linked, directly or, more generally, via a linker, such as a GS linker to human serum albumin or provided as an Fc fusion, or in any of the other constructs described herein.

[1000] These and other such dAbs and TNFR1 binding molecules can be modified to increase specificity for TNFR1 by eliminating any antagonistic activity for TNFR2, and/or to increase or add TNFR2 agonist activity, and/or can be modified to reduce or eliminate immunogenic epitopes, and/or can be linked to activity modifiers, such Fc units and modified Fc units/modified Fc dimers, and/or serum half-life extending moieties. The dAbs and other TNFR1 binding molecules are those that do not have TNFR1 agonist activity. They can be identified by the THP1 assay exemplified herein, or they can be identified as those that bind to the same epitope as dom1h-131-206.

[1001] The HEK293 cell line is used for transient expression, and, following the in vitro evaluation of the expressed antagonists and the identification of molecules with the desired properties, such as high affinity for TNFR1 (e.g., K_{d}<50 nM, or <10 nM, or < or 5 nM), and potent inhibition of TNFR1 signaling (e.g., IC₅₀<50 nM, or <10 nM, or <5 nM). Generally, it is picomolar (pM) affinity, such as around or about 19 pM affinity or 20 pM, 15 pM, 10 pM, 5 pM, 2 pM, or 1 pM affinity.

[1002] Stable cell lines are prepared in a derivative of CHO cells. Transient expression is optimized in CHO DG44 cells (e.g., CHO-DG44 (DHFR-) and FreeStyle™ CHO-S cells, Invitrogen), resulting in transfected pools that are screened to identify or select high expressing clones. No poly-histidine, or other purification tags, are used. Instead, proteins for screening are purified from serum-free medium by HPLC in combination with other well-known methods. The matrix used for HPLC is the Amsphere™ A3 Protein A chromatography resin (JSR Life Sciences), or other similar resin, following the manufacturer's protocols. If the protein is not at least 95% pure, as judged by size exclusion HPLC, further purification is performed (e.g., ion exchange or hydrophobic chromatography).

[1003] Endotoxin is removed (see, e.g., Vazquez-Lombardi et al. (2018) for an exemplary protocol). After protein purification, endotoxin levels are determined using a detection kit, such as the QCL-1000 Endpoint Chromogenic LAL Assay Kit (Lonza). For endotoxin removal, the theoretical pI of the purified protein is determined using a sequence analysis tool (e.g., ExPASy ProtParam), and the pH low-endotoxin PBS buffer is adjusted to a pH that is below, but close to, the theoretical pI of the purified protein. The protein sample then is dialyzed against at least 30 volumes of pH-adjusted PBS for at least 2 hours at 4° C. An additional dialysis step is performed overnight, and then again for at least 2 hours the following day. The sample then is purified using anion exchange affinity chromatography, retested to determine endotoxin levels, and the process is repeated until an acceptable level of endotoxin is achieved. The size and purity of the protein products is determined by SDS-PAGE analysis or other suitable method. Alternatively, other methods can be used, such as the Proteus Endotoxin Removal Kit, and accompanying manufacturer's handbook (BIORAD, see, bio-rad-antibodies.com/static/uploads/ifu/pur030.pdf). This step can be repeated until endotoxin reaches desirable levels, typically >0.5 endotoxin units/ml (less than or equal to 0.5 endotoxin units/ml).

### Screening of Purified Proteins

[1004] The purified TNFR1 antagonist molecule candidates are screened to measure binding affinity for the extracellular domain of TNFR1, using methods described above in the detailed description, or methods that are known in the art, such as, for example, immunoassays (e.g., ELISA), surface plasmon resonance (SPR), isothermal titration calorimetry (ITC), or other kinetic interaction assays known in the art. SPR can be performed using several commercially available platforms, such as the BIAcore systems (GE Healthcare Life Sciences), for example. Exemplary assays are described, for example, in Lang et al. (2015) J. Biol Chem 291:5022-5037, which describes and compares the various assays to assess binding affinity. Candidates that are selected include those that have a K_{d} value of <5 nM.

[1005] The TNFR1 antagonists also are screened to determine whether binding to TNFR1 is competitive or non-competitive with respect to TNF, using methods known in the art, such as SPR. If an inhibitor binds to a receptor (e.g., TNFR1) and blocks binding of the ligand (e.g., TNF), for example, by attaching to the active site, this is competitive inhibition, because the inhibitor “competes” with the substrate for the enzyme; that is, only the inhibitor or the substrate can be bound at a given moment. In non-competitive inhibition, the inhibitor does not block the ligand from binding to the ligand-binding site on the receptor. Instead, it attaches at another site and blocks the receptor from responding to bound ligand. This inhibition is said to be “non-competitive” because the inhibitor and substrate can both be bound at the same time. Thus, if ligand is added to the receptor-binding assay at a saturating concentration and it does not inhibit binding of the antibody, then the two molecules are independent and non-competitive. The reverse is also valid. If the two are competitive, then increasing concentrations of the antibody will prevent TNF from binding to the receptor. This is valid whether the binding assays are done on cells, or with receptors or ligands bound to a surface. For exemplary assays, see, e.g., Frey et al. (2001) Current Protocols in Neuroscience, “Receptor Binding Techniques,” available at doi.org/10.1002/0471142301.ns0104s00.

[1006] For example, the ability for TNF to bind human TNFR1 coated on a BIAcore chip first is determined. The TNFR1 surface then is saturated with the TNFR1 antagonist molecule, and TNF subsequently is injected, and the binding of TNF to TNFR1 is re-evaluated. If the binding is non-competitive, they both bind to TNFR1; if it is competitive, they will interfere with each other. If the binding of TNF is unaffected, or only slightly reduced, then binding of the antagonist to TNFR1 is non-competitive with respect to TNF, and if the binding of TNF is abrogated, or significantly reduced, then the binding of the antagonist is considered to be competitive with respect to TNF. For purposes herein, competitive binders are selected.

[1007] The TNFR1 antagonist molecules are further screened to determine their capacity to inhibit TNFR1 signaling in the presence of TNF on cells, using methods known in the art, such as, for example, the method described by McFarlane et al. (2002) FEBS Lett. 515(1-3):119-126, which results in the activation of NFxB-luciferase expression (i.e., a gene reporter assay). Cells used in these experiments do not express TNFR1 or TNFR2 (e.g., the myeloma cell lines AMO1, U266, and L363; see, e.g., Rauert et al. (2011) Cell Death Dis. 2(8):e194), unless transfected with a TNFR1- or TNFR2-expressing plasmid. Alternatively, human cell lines in which TNFR1 and/or TNFR2 genes are inactivated or knocked out using CRISPR vectors, antisense RNA expression, or other methods known in the art, can be used. TNFR1⁻ and/or TNFR2⁻ cell lines, which can be obtained from commercial sources (e.g., Genoway and Synthego), also can be used. These cell lines can then be specifically transfected with TNFR1 and/or TNFR2 expression cassettes. For example, cells expressing TNFR1, TNFR2, or TNFR1 and TNFR2, can be used to assess the selectivity of the antagonists for TNFR1, and to determine the potency of inhibition of TNF signaling via TNFR1.

[1008] To determine the inhibition of TNFR1 signaling by the TNFR1 antagonists, cells expressing human TNFR1 are transiently transfected with a NF-κB-luciferase reporter construct using Lipofectamine, and receptor-stimulated luciferase transcription is measured 48 hours after transfection. Cells stably expressing TNFR1 and NF-κB-luciferase are plated into 24-well plates at a density of 1×10⁵ cells/ml culture media, and incubated until they reach 80% confluency (~24 hours). The cells then are incubated with 50 ng/ml TNF and varying concentrations of TNFR1 antagonist for 6 hours. NF-κB-stimulated luciferase activity is detected by washing the cells twice with ice-cold PBS, adding 200 μl of ice-cold lysis buffer (25 mM Tris-phosphate pH 7.8, 8 mM MgCl₂, 1 mM DTT, 1% Triton X-100, 15% glycerol), and incubating on ice for 5 min. Cell extracts then are scraped into 1.5 ml Eppendorf tubes, centrifuged to pellet cell debris, and 100 μl of the supernatant is used to measure luciferase induction using a luminometer. The IC₅₀ then is calculated by plotting the relative luminescence units (RLUs) against TNFR1 antagonist concentration, and using a curve fitting software, such as GraphPad Prism. Other similar assays for evaluating the inhibition of TNFR1 signaling include assays that measure the induction of phospho-IκBα, which is indicative of the activation of the classical NF-κB pathway, in cells expressing TNFR1 that are treated with TNF, (see, e.g., Rauert et al. (2011) Cell Death Dis. 2(8):e194).

[1009] TNFR1 antagonist candidates that exhibit inhibition of TNFR1 signaling of at least 80%, and IC₅₀ values approximately equal to the K_{d} (i.e., <5 nM), as determined above, are selected for further optimization.

### Example 2

### Optimization of Selected Candidate Univalent TNFR1 Antagonist Molecules Optimization of Affinity for TNFR1 and Potency of TNFR1 Signaling Inhibition

[1010] Candidate TNFR1 antagonist molecules, which meet the selection criteria outlined above (i.e., high affinity for TNFR1 and potent inhibition of TNFR1 signaling, with K_{d} and IC₅₀ values of <5 nM), are optimized to increase affinity for TNFR1, and potency of TNFR1 signaling inhibition. For purposes herein the candidates also are selected so that they do not have TNFR1 agonist activity.

[1011] These parameters are achieved by methods that include one or more of random mutagenesis, site-directed mutagenesis, molecular modeling, and/or error-prone PCR to achieve K_{d} and IC₅₀ values of as low as <1 nM, generally, at least equal to or <100 nM, <50 nM, <10 nM, < or 5 nM. For example, this can be achieved by the method (see, Tiller et al. (2017) Frontiers Immunol. 8:986) in which amino acids most critical to binding are conserved, while the remaining amino acids of the V_{H} domain are subjected to mutagenesis, and a phage library is prepared, and screened for high affinity binding variants for TNFR1, which are selected. In accord with this method, a phage display library to select such variants is produced. In a first step, computational and experimental alanine scanning mutagenesis identifies sites in the complementarity-determining regions (CDRs) that are permissive to mutagenesis while maintaining antigen binding. Next, the most permissive CDR positions are mutated using degenerate codons to encode wild-type residues, and a small number of the most frequently occurring residues at each CDR position, based on natural antibody diversity. This mutagenesis approach results in antibody libraries with variants that have a wide range of numbers of CDR mutations, including antibody domains with single mutations, and others with tens of mutations. In a last step, the libraries (~10 million variants) displayed on the surface of yeast are sorted to identify CDR mutations with the greatest increases in affinity. Lastly, the candidates are those that do not have TNFR1 agonist activity; they can be selected by appropriate assays (i.e., THP1 assay), and/or by identifying those that bind to the same epitope as the dAb of SEQ ID NO:59, or the construct designated EN-1206, exemplified in the Examples below.

### Half-Life Extension

[1012] Optimized molecules then are linked to a half-life extending moiety, for example, by fusion with IgG Fc domains, particularly modified Fc domains, or human serum albumin (HSA), or by PEGylation, as described above in the detailed description, to achieve an in vivo serum half-life of about 1, 2, 3, 4, 5, 6, 7, 8, 9, 10, or more, days, such as 10-12 days, in SCID mice. The modified molecules then are retested in the in vitro assays described above to ensure that the high affinity binding to TNFR1 and potent inhibition of TNFR1 signaling is retained. Production of successful candidates is scaled-up for further in vitro and in vivo assays.

### In Vitro Assays

### Phagocytosis Assays

[1013] As discussed and described in the detailed description, existing TNF blockers, which inhibit TNFR1 activity, also inhibit TNFR2. TNF blockers have two types of black box warnings from regulatory agencies. The first is susceptibility of anti-TNF (TNF blocker) treated patients to infection. These infections can involve various organ systems and sites due to bacterial, mycobacterial (e.g., tuberculosis), fungal (e.g., histoplasmosis, aspergillosis, candidiasis, coccidioidomycosis, blastomycosis, and pneumocystis), viral (e.g., hepatitis B), and other opportunistic pathogens (organisms that usually do not cause disease in healthy people, but can cause serious illness when a person's immune system (resistance) has weakened). Another issued black box warning is related to pediatric malignancy (see, e.g., online.epocrates.com/u/10b3301/Humira/Black+Box+Warnings). As discussed in the detailed description, this vulnerability results from the total blockade of signaling by TNFR1 and TNFR2 when their ligand, TNF, is blocked. This suppression of innate immunity effect of TNF is mediated by TNFR2 (see, e.g., Ahmad et al. (2018) Front. Immunol. 9:2572), and is primarily mediated by the transmembrane form of TNF, which preferentially activates TNFR2 (see, e.g., Miller et al. (2015) Journal of Immunology 195(6):2633-2647).

[1014] It has been shown that anti-TNF therapeutics, such as adalimumab, infliximab, and etanercept, have an inhibitory effect on IFN-γ-induced phagosome maturation in phorbol myristate acetate-differentiated human THP-1 cells. Adalimumab and infliximab, but not etanercept, suppress phagosome maturation in primary human peripheral blood monocyte-derived macrophages in the presence or absence of IFN-7 (see, e.g., Harris et al. (2008) J. Infect. Dis. 198:1842-1850). In view of the above, an advantage of a specific TNFR1 inhibitor construct is preservation of TNFR2 function, and therefore, macrophage function; macrophages are important in ridding an organism of opportunistic infection. Opportunistic infectious agents include mycobacteria that cause tuberculosis (see, e.g., Fraga et al. (2018) Curr. Issues Mol. Biol. 25:169-198). Macrophage function is disrupted in autoimmune disease in patients treated with TNF blockers. A TNFR1-specific antagonist only inhibits TNFR1 function, thereby avoiding disruption of TNFR2 function, which is needed for normal macrophage function. These TNFR1-specific antagonists can be identified by an assay for anti-TNF effects on macrophage phagocytosis. Among the TNFR1-specific antagonists that are identified, are those that also stimulate TNFR2 function, thus boosting macrophage activity (TNFR1 antagonist and TNFR2 agonist).

Assay to Determine Effects of TNFR1 Antagonists on Macrophage Responses to Mycobacterium tuberculosis Infection

[1015] TNF plays an important role in mediating the inflammatory host response to various pathogens, including Mycobacterium tuberculosis; TNF also plays a role in the immunopathology of tuberculosis (TB). Mycobacterial infection induces the secretion of TNF by macrophages. TNF enhances the ability of macrophages to phagocytose and kill mycobacteria. TNF also stimulates macrophage apoptosis, leading to increased killing and presentation of mycobacterial antigens by dendritic cells. TNF also is required for the formation and maintenance of granulomas; neutralization of TNF in mice chronically infected with M. tuberculosis disrupts the integrity of granulomas, worsening infection and increasing mortality. TNF blockers, such as adalimumab and infliximab, increase the susceptibility to infection with various pathogens, including M. tuberculosis, and increase the risk of reactivation of latent tuberculosis, by suppressing mycobacteria-containing phagosome maturation in human macrophages. Phagosome maturation (i.e., phagosome acidification and fusion with lysosomes) is essential for the presentation of mycobacterial antigens to T-cells, and the initiation of adaptive immune responses (see, e.g., Harris et al. (2008) J. Infect. Dis. 198:1842-1850).

[1016] In order to identify and/or characterize TNFR1 antagonists, the effects of TNFR1 antagonists provided herein on macrophage responses to infection with M. tuberculosis is assessed. Mycobacteria-containing phagosome maturation in human macrophages is analyzed, and compared to phagosome maturation in TNF blockers, such as adalimumab, using the methods described in Harris et al. (2008) J. Infect. Dis. 198:1842-1850. The TNFR1 antagonists that do not increase susceptibility to infection compared to a known TNF blocker, such as adalimumab, are of interest.

### Preparation of THP-1 Cells and Monocyte-Derived Macrophages (MDMs)

[1017] Human THP-1 cells are cultured in RPMI 1640 (Invitrogen) with 10% fetal bovine serum (FBS; Gibco). The cells are differentiated into macrophage-like cells by treatment with 100 nmol/L phorbol myristate acetate (PMA) for 24 hours, and then cultured in normal medium for 3 days. To prepare human monocyte-derived macrophages (MDMs), peripheral blood mononuclear cells (PBMCs) are isolated from the blood of healthy donors using density gradient centrifugation on Histopaque®-1077 (Sigma). Monocytes are isolated by adherence to gelatin-coated culture dishes, and cultured overnight in RPMI 1640 with 5% human AB serum (Sigma). Adherent cells are removed with 10 mmol/L EDTA in PBS, and grown on coverslips in 12-well plates for 10 days. THP-1 cells and MDMs are grown on coverslips at a concentration of 2×10⁵ cells/well.

### Preparation of the Mycobacteria

[1018] Green fluorescent protein (GFP)-labeled Mycobacterium bovis bacillus Calmetter-Guerin (GFP-BCG), and the attenuated M. tuberculosis strain H37Ra and its virulent counterpart, H37Rv, are grown in Middlebrook 7H9 broth with 0.5% Tween, 0.2% glycerol, and 10% albumin-dextrose-catalase supplement (BD). The mycobacteria are grown to log phase before use, and are resuspended in RPMI 1640 with 10% FBS before infection. M. tuberculosis strain H37Ra is fluorescently labeled with PKH67 (Sigma), and strain H37Rv is labeled with fluorescein isothiocyanate (FITC, 1 mg/mL; Sigma), following the manufacturer's protocols.

### Determination of Phagosome Maturation

[1019] Mycobacteria can inhibit the fusion of phagosomes with lysosomes, preventing the acidification and recruitment of lysosomal hydrolases. This blockade of phagosome maturation can be overcome by pre-treating the macrophages with IFN-7. Treatment of cells infected with mycobacteria with TNF (5 ng/mL) also enhances phagosome acidification. To determine the effects of the TNFR1 antagonist and TNF blockers on the fusion of mycobacterial phagosomes with lysosomes in macrophages, PMA-differentiated THP-1 cells or human peripheral blood MDMs are infected with GFP-BCG, or PKH67-labeled M. tuberculosis strain H37Ra, or FITC-labeled M. tuberculosis strain H37Rv, in the presence of TNFR1 antagonist or TNF blocker, with or without IFN-7 treatment, and phagosome-lysosome fusion is analyzed by confocal microscopy, using LysoTracker® Red (LT) as a marker for acidified phagosomes, and CD63 and cathepsin D as phagolysosomal markers. The inhibition of IFN-γ-induced phagosome maturation/acidification is determined by colocalization of labeled mycobacteria with LysoTracker® Red, CD63 or cathepsin D. For example, a decrease in the percent colocalization of labeled mycobacteria with LT, or with CD63, or with cathepsin D, as compared to the control, is indicative of the inhibition of IFN-γ-induced phagosome acidification.

[1020] TNFR1 antagonist or TNF blocker (e.g., adalimumab, infliximab, etanercept, or others; 10 μg/mL), with or without IFN-γ (200 U/mL), are added to the THP-1 cells or MDMs for 24 hours before infection. As a control, cells are treated with medium only, or with 10 μg/mL human IgG1 from patients with myelomas producing IgG1 (Calbiochem). Cells then are infected with M. bovis GFP-BCG, PKH67-labeled M. tuberculosis H37Ra, or FITC-labeled M. tuberculosis H37Rv for 15 min, washed 3 times with PBS to remove unbound mycobacteria, and incubated for 2 hours. The multiplicity of infection (MOI) is recorded microscopically 15 min after infection of macrophages by acid-fast bacilli staining. Cells are infected at an MOI of 1-5 bacilli in approximately 70% of cells.

[1021] After the 2 hour incubation, cells are fixed in 2% paraformaldehyde for 20 min at room temperature (RT); for strain H37Rv, cells are fixed in 4% paraformaldehyde overnight. Cells are then permeabilized with 0.1% Triton X-100 in PBS, and blocked with 1% bovine serum albumin and 1% goat serum in PBS for 30 min at RT. Cells are incubated with primary antibody (1 μg/mL mouse monoclonal antibody against CD63 (LAMP-3; Santa Cruz Biotechnology); or 10 μg/mL mouse monoclonal antibody against cathepsin D (Calbiochem)) for 1 hour at RT, followed by secondary antibody (4 μg/mL Alexa Fluor 488- or 568-labeled goat anti-mouse IgG; Invitrogen) for 1 hour at RT. Alternatively, prior to fixation, the cells are incubated with LysoTracker® Red DND-99 (100 nmol/L; Invitrogen) for the final 60 min of incubation with the mycobacteria. LysoTracker® Red DND-99 is a red-fluorescent dye for labeling and tracking acidic organelles (such as acidified phagosomes) in live cells.

[1022] The coverslips are mounted onto glass slides with fluorescent mounting medium (Dako), and images are recorded on a laser scanning confocal microscope, such as the Olympus FluoView™ 1000 and Zeiss LSM 510 laser scanning confocal microscope. Images are analyzed and prepared using the appropriate software and Adobe Photoshop.

### Measurement of TNF

THP-1 cells are prepared as described above and infected with BCG or M. tuberculosis H37Ra, with or without IFN-γ pretreatment. The levels of immunoreactive TNF in supernatants (secreted in response to mycobacterial infection) are measured using a commercial ELISA kit (R&D systems), in accordance with the manufacturer's instructions.
Inflammatory Cytokines are Up-regulated in TNF Blockade vs. Specific TNFR1 Inhibition in Collagen-Induced Arthritis

[1023] Transgenic mice (C57/BL6N.Q;H-2q/HuTNFR1/Hunt) with collagen-induced arthritis (CIA) (see, e.g., McCann et al. (2014) Arthritis & Rheumatology 66(10):2728-2738) are treated with TNF blocker and the TNFR1-specific antagonist. Serum inflammatory cytokines are evaluated (IFN-gamma, IL-12p70, IL-10, RANTES (CCL5); see, e.g., McCann et al. (2014) Arthritis & Rheumatology 66(10):2728-2738). Antagonists that are specific for blocking TNFR1 induce significantly less of one or more of IFN-gamma, IL-12p70, IL-10, or RANTES (CCL5). This results from sparing TNFR2 function and regulatory T-cell function in the spleen and lymph nodes.

### In Vivo Assays

[1024] Studies are performed with humanized (HuTNFR1/HuTNF) transgenic mice. The TNFR1 antagonist molecules are assessed for efficacy in multiple autoimmune disease models. These include the models described above, which express human transgenes for TNFR1 and TNF. Alternative models for autoimmune disease are known. For example, models, including those for RA, are described in detail in Schinnerling et al. ((2019) Front. Immunol 10:203). To establish efficacy, the specific TNFR1 antagonist constructs, as well as other constructs provided herein, are tested in more than one model. Included among the models are at least rheumatoid arthritis (RA), Crohn's disease, and multiple sclerosis (experimental autoimmune encephalitis) models (discussed in the detailed description).

[1025] Inflammatory bowel diseases (IBDs, including ulcerative colitis and Crohn's disease) were the first approved indication for TNF Blockers. Numerous mouse models of these diseases are available and have been described by Mueller ((2002) Immunology 105(1):1-8). As discussed in the detailed description, autoimmune neurodegenerative diseases, including multiple sclerosis (MS) and Alzheimer's disease, are important disease targets. Alzheimer's disease (AD) is the leading cause of dementia worldwide, and represents one of the most serious health issues for the elderly. An estimated 5.4 million Americans have AD, and this number is expected to triple by 2050 if there are no medical breakthroughs to stop, prevent, or slow the disease (see, e.g., Chang et al. (2017) J Cent. Nerv. Syst. Dis. 9:1179573517709278). Evidence indicates that TNFR1 antagonist constructs and other constructs provided herein are therapeutic candidates, since subjects who have experienced prolonged treatment with TNF blockers are less likely to develop the disease (see, e.g., Chou et al. (2016) CNS Drugs 30:1111). Data show that up-regulated TNF expression is associated with different neurodegenerative diseases and conditions, such as Alzheimer's disease, Parkinson's disease, stroke, and multiple sclerosis (see, e.g., McCoy et al. (2008) J. Neuroinflammation 5(1):45). Existing TNF blockers, however, do not appear to be effective for treating, ameliorating, preventing, or slowing disease progression (see, e.g., Tortarolo et al. (2015) J. Neurochem. 135:109-124). As described herein, various lines of evidence indicate that TNF blockers do not work in such indications because of co-inhibition of TNFR1 and TNFR2; TNFR2 has neuro-protective properties that are lost by treatment with TNF blockers. Others have attempted to approach this problem with various forms of “TNFR1 inhibitors” or “TNFR2 agonists.” None of these studies included cross-reactivity to determine whether TNFR1 or TNFR2 was selectively targeted, as opposed to being one of many epitopes in the body that could be targeted.

[1026] This problem is solved herein. First, a family of anti-TNFR1 antagonists is generated, and tested in the above models, showing that they act as predicted. Then, immunochemistry is used to demonstrate that they are selective. Several contract research laboratories offer this service (e.g., Sino Biological, Inc., and LSBio).

[1027] As discussed in the detailed description, other autoimmune and chronic inflammatory disease states are associated with the presence of TNF. These include type II diabetes and endometriosis. Mouse models of these diseases are known, and HuTNFR1/HuTNF transgenic versions of these mice are used to demonstrate efficacy with the specific anti-TNFR1 antagonists provided herein.

### Acute Respiratory Distress Syndrome

[1028] Viral pathogens of the respiratory tract (e.g., influenza, SARS viruses/coronaviruses) infect respiratory epithelial cells, and tissue-resident alveolar macrophages are the first responders to viral infection in the lung. They effect clearance through the phagocytosis of opsonized viral particles or infected apoptotic cells and the release of a plethora of inflammatory cytokines and chemokines to initiate an immune response (see, e.g., Herold et al. (2015) Eur. Resp. J. 45:1463-1478). TNF blockers have been shown to extend survival of mice infected with influenza (see, e.g., Shi et al. (2013) Crit. Care 17:R301). TNF blockers have been used for treating SARS-Cov 2 (see, e.g., Feldmann et al. (2020) Lancet 395:1407-1409). As described in the detailed description, a known effect of TNF blockers is to reduce regulatory T-cells (Tregs), which is problematic since Tregs are a natural suppressor of inflammation. Thus, a TNFR1-specific inhibitor, that does not interact with TNFR2 or that agonizes TNFR2, as described and provided herein, is superior for this purpose. To test the constructs provided herein, mice are engineered to lack endogenous TNFR1, and to express HuTNFR1/HuTNF. These mice will manifest the acute respiratory distress syndrome induced by HuTNF/HuTNFR1 following infection with influenza (as described in Shi et al. (2013) Crit. Care 17:R301). TNFR1-specific antagonist constructs that do not antagonize TNFR2 are administered. Efficacy is determined by any of several criteria:
[1029] 1. Significantly decreased circulating inflammatory cytokines (e.g., IFN-gamma, IL-1alpha, IL1-beta, and IL-17) vs. a TNF blocker;
[1030] 2. Significantly faster recovery measured by weight gain (see, e.g., Shi et al. (2013) Crit. Care 17:R301), compared to a TNF blocker; and
[1031] 3. Significantly increased survival (see, e.g., Shi et al. (2013) Crit. Care 17:R301), compared to a TNF blocker.

[1032] Transgenic mice that express human TNFR1 and human TNFR2 for use in disease models are generated by standard genetic engineering methods that are known in the art, such as those described by Atretkhany et al. (2018) Proc. Natl. Acad. Sci. U.S.A. 115(51):13051-13056. Particular in vivo assays for various diseases and conditions are as follows. For example, humanized RA mouse models, such as the collagen-induced arthritis (CIA) model of RA, or any other animal models of RA that are known in the art and/or described herein, are used to assess the therapeutic effects of the TNFR1 antagonist molecules provided herein, and compare them to the therapeutic effects of anti-TNF therapies, such as etanercept or adalimumab. The TNFR1 antagonist molecules provided herein, or an anti-TNF therapy, such as etanercept or adalimumab, is administered to the animal daily for a total of 10 days following the onset of clinical arthritis in one or more limbs. The degree of swelling in the initially affected joints is monitored by measuring paw thickness using calipers. Serum is drawn from mice for the measurement of proinflammatory cytokines and chemokines, such as, for example, granulocyte-macrophage colony stimulating factor (GM-CSF), interleukin-10 (IL-10), IL-1β, IL-6, IL-8, RANTES (CCL5) and monocyte chemoattractant protein 1 (MCP-1; also known as CCL2). The regression of RA in the mouse models then is compared between the mice administered the TNFR1 antagonist molecule, and the mice administered etanercept or adalimumab.

[1033] The TNFR1 antagonist molecules provided herein also are tested in humanized mouse models of severe acute respiratory syndrome (SARS), and of viral-induced cytokine storm. Mouse models of SARS are generated, for example, by infecting humanized hTNFR1 (or hTNFR1/hTNFR2) knock-in mice with varying doses, such as 10², 10³, 10⁴, and 10⁵ plaque-forming units (PFUs), of SARS-CoV. The TNFR1 antagonist molecule is administered to the infected mice, and survival is evaluated, and compared to survival of mice administered an anti-TNF therapy, such as adalimumab.

[1034] Viral-induced mouse models of cytokine storm include, for example, lymphocytic choriomeningitis virus (LCMV)-induced models of cytokine storm syndrome (CSS). LCMV-induced mouse models of CSS are generated by administering 2×10⁵ PFUs of LCMV-Armstrong, intraperitoneally to 8-12 week-old Perforin-deficient (Prf^{-/-}) or Prf-Tmem178 double knockout mice. To deplete monocytes/macrophages, 100 μl of clodronate-liposomes are intravenously injected into Prf^{-/-} mice two days prior to the LCMV infection, and 48 and 96 hours later. Alternatively, 1 mg of the neutralizing anti-CSF1 antibody (Clone 5A1, BioXCell) is administered 2 days prior to infection, and 0.5 mg antibody is administered 48 and 96 hours later. Animals are bled via submandibular vein puncture to measure serum cytokines on days 3 and 8 post-infection (see, e.g., Mahajan et al. (2019) J. Autoimmun. 100:62-74).

### Example 3

Exemplary TNFR1 Antagonist Constructs that Contain Human TNFR1 Antagonist Antibody Fragments (dAbs, scFvs, Fabs)

[1035] Provided herein is a TNFR1 antagonist construct that selectively inhibits TNFR1, without inhibiting TNFR2. To avoid TNFR1 receptor clustering, which agonizes TNFR1, the TNFR1 antagonist is monomeric and monovalent. It is shown herein, however, that TNFR1 antagonists can be bivalent. As discussed, these include TNFR1 agonists that bind the same epitope as the construct designed EN-1206.

[1036] For monovalent constructions, the TNFR1 antagonist contains a human single domain antibody (dAb) that is specific for TNFR1. The dAb contains a variable region heavy chain (V_{H}) or a variable region light chain (V_{L}) domain. For example, the dAb contains any of the dAbs whose amino acid sequences are set forth in any one of SEQ ID NOs: 54-672, or a dAb with at least or at least about 90% or 95% sequence identity to the dAb of any of SEQ ID NOs: 54-672, that retains binding affinity for TNFR1. Alternatively, the TNFR1 antagonist contains an scFv, a Fab, or other antigen-binding fragment, such as those derived from a human TNFR1 antagonist antibody, such as H398 or ATROSAB. For example, the TNFR1 antagonist contains the H398-derived scFv set forth in SEQ ID NO: 677 or 678; or the ATROSAB-derived scFvs set forth in any one of SEQ ID NOs: 673-676; or the ATROSAB-derived Fab fragment light and heavy chains set forth in any of SEQ ID NOs: 679 and 680, respectively (FabATR), or SEQ ID NOs: 681 or 682, respectively (Fab 13.7); or an scFv or Fab fragment with at least or at least about 90% or 95% sequence identity to the scFvs of any of SEQ ID NOs: 673-678, or the Fab light and heavy chains of any of sequence ID NOs: 679 and 680, respectively (FabATR), or SEQ ID NOs: 681 or 682, respectively (Fab 13.7), and that retain the affinity for TNFR1.

[1037] As described herein, the dAb is selected so that it does not agonize TNFR1 or is identified as one that binds the same epitope as the construct designated EN-1206.

[1038] The TNFR1 antagonist is fused to a serum half-life extender, such as an IgG Fe, particularly an Fc modified to eliminate or reduce ADCC, ADCP, and/or CDC, human serum albumin (HSA), and/or a poly(ethylene)glycol (PEG) molecule. For example, the C-terminus of the human anti-TNFR1 dAb, scFV, Fab or other antigen-binding fragment, is fused with the N-terminus of the Fc region of a human IgG1 or IgG4 antibody via a linker. An IgG1 Fc region, such as the IgG1 Fc derived from trastuzumab (see, SEQ ID NO:27), or an IgG4 Fc region, such as the IgG4 Fc derived from nivolumab (see, SEQ ID NO:30), is used. The linker includes a portion of the hinge sequence of trastuzumab, containing the sequence of amino acid residues SCDKTH (corresponding to residues 222-227 of SEQ ID NO:26), when the Fc is derived from trastuzumab, or can contain the hinge sequence of nivolumab, containing the sequence of amino acid residues ESKYGPPCPPCP (corresponding to residues 212-223 of SEQ ID NO:29), or a portion thereof that provides flexibility or other structural property, when the Fc is derived from nivolumab. To confer protease resistance and to increase the flexibility of the fusion protein, the SCDKTH or ESKYGPPCPPCP hinge sequence is replaced with a short glycine-serine (GS) peptide linker, such as, for example, (GSGS) or (GGGGS)ₙ (see, e.g., residues 199-202, and 116-120 of SEQ ID NO:707, respectively), where n=1-5 or 1-6, or other combination of Gly and Ser residues, such as, for example, GGGGSGGGGSGGGGS (e.g. residues 116-130 or SEQ ID NO:707). In other embodiments, the C-terminus of the human anti-TNFR1 dAb, scFv, Fab or other antigen-binding fragment, is linked to the GS linker, and the GS linker is connected to all or a portion, sufficient to provide flexibility, of the trastuzumab or nivolumab hinge sequence, which is connected to the N-terminus of the corresponding Fc region. In some embodiments, a second Fc subunit, is linked to the first Fc subunit, to increase the serum half-life and stability of the molecule. Because there are two Fc regions, any resulting construct is not a fusion protein since it contains one non-contiguous Fc region. In some embodiments, the N-terminus of the human TNFR1 antagonistic dAb, scFV, Fab or other antigen-binding fragment, is fused to the C-terminus of the serum half-life extender via a linker, as described above.

[1039] Also provided herein are TNFR1 antagonist fusion proteins that contain an anti-TNFR1 dAb, scFv, Fab, or other antigen-binding fragment, fused with human serum albumin (HSA), via a short peptide linker, such as (GSGS)ₙ or (GGGGS)ₙ, where n=1-5 or 6, such as, for example, GGGGSGGGGSGGGGS.

[1040] Also provided herein are TNFR1 antagonist molecules that contain an anti-TNFR1 dAb, scFv, Fab, or other antigen-binding fragment, linked to a PEG molecule that is at least 30 kDa in size.

[1041] As described herein, these constructs can be modified to reduce or eliminate immunogenicity. The TNFR1 antagonist dAb, scFv, Fab, or other antigen-binding fragment is analyzed by in silico, in vitro and/or in vivo methods to predict or identify immunogenic sequences. Upon identification of immunogenic sequences, such as B-cell and/or T-cell epitopes, the identified sequences are modified by mutagenesis, for example, by alanine scanning, as described elsewhere herein, to de-immunize the epitopes/remove or replace the immunogenic sequences.

[1042] The following are exemplary constructs of the TNFR1 antagonist fusion proteins described and provided herein. In all embodiments that include the Fc of trastuzumab or the Fc of nivolumab, the Fc regions optionally are modified to reduce or eliminate immune effector functions, including ADCC, ADCP, and CDC, and also, optionally are modified to enhance binding to FcRn, increasing the serum half-life of the fusion proteins, and also to optionally replace or otherwise modify or remove immunogenic sequences.

[1043] Fc modifications that reduce or eliminate immune effector functions are summarized in Table 9, above, and Fc modifications that enhance FcRn binding are summarized in Table 7, above. Any one or a combination of such modifications is/are included in the Fc regions of the fusion proteins provided herein. All of the exemplary constructs provided herein also are prepared with the TNFR1 antagonist at the C terminus of the fusion protein, instead of at the N-terminus.

1s) DOM1 h-574-208-GGGGSGGGGSGGGGS-BSA

[1044] Provided herein is a TNFR1 antagonist fusion protein, containing the human TNFR1 antagonist dAb DOM1 h-574-208 (SEQ ID NO:54). The C-terminus of DOM1 h-574-208 is fused to a GGGGSGGGGSGGGGS peptide linker, which is fused to the N-terminus of human serum albumin (HSA) without the signal peptide (corresponding to residues 19-609 of SEQ ID NO:35). The DOM1 h-574-208-GGGGSGGGGSGGGGS-HSA fusion protein has the following sequence (SEQ ID NO:721):

EVQLLESGGGLVQPGGSLRLSCAASGFTFDKYSMGWVRQAPGKGLEWVSQ
ISDTADRTYYAHAVKGRFTISRDNSKNTLYLQMNSLRAEDTAVYYCAIYT
GRWVPFEYWGQGTLVTVSSGGGGSGGGGSGGGGSRGVFRRDAHKSEVAHR
FKDLGEENFKALVLIAFAQYLQQCPFEDHVKLVNEVTEFAKTCVADESAE
NCDKSLHTLFGDKLCTVATLRETYGEMADCCAKQEPERNECFLQHKDDNP
NLPRLVRPEVDVMCTAFHDNEETFLKKYLYEIARRHPYFYAPELLFFAKR
YKAAFTECCQAADKAACLLPKLDELRDEGKASSAKQRLKCASLQKFGERA
FKAWAVARLSQRFPKAEFAEVSKLVTDLTKVHTECCHGDLLECADDRADL
AKYICENQDSISSKLKECCEKPLLEKSHCIAEVENDEMPADLPSLAADFV
ESKDVCKNYAEAKDVFLGMFLYEYARRHPDYSVVLLLRLAKTYETTLEKC
CAAADPHECYAKVFDEFKPLVEEPQNLIKQNCELFEQLGEYKFQNALLVR
YTKKVPQVSTPTLVEVSRNLGKVGSKCCKHPEAKRMPCAEDYLSVVLNQL
CVLHEKTPVSDRVTKCCTESLVNRRPCFSALEVDETYVPKEFNAETFTFH
ADICTLSEKERQIKKQTALVELVKHKPKATKEQLKAVMDDFAAFVEKCCK
ADDKETCFAEEGKKLVAASQAALGL

[1045] Alternatively, the GGGGSGGGGSGGGGS linker is replaced by a Gly-Ser linker, such as a (GSGS)ₙ or a (GGGGS)ₙ linker, where n=1, 2, 3, 4 or 5, or any other suitable short peptide linker as described herein or as known in the art.

1t) DOM1 h-574-208-GGGGSGGGGSGGGGS-PEG_{30kDa}

[1046] Provided herein is a TNFR1 antagonist fusion protein, containing the human TNFR1 antagonist dAb DOM1 h-574-208 (SEQ ID NO:54). The C-terminus of DOM1 h-574-208 is fused to a GGGGSGGGGSGGGGS peptide linker, which is covalently linked to a PEG molecule of 30 kDa in size.

[1047] Alternatively, the GGGGSGGGGSGGGGS linker is replaced by a Gly-Ser linker, such as a (GSGS)ₙ or a (GGGGS)ₙ linker, where n=1, 2, 3, 4 or 5, or any other suitable short peptide linker as described herein or as known in the art. Alternatively or additionally, the PEG molecule can have a molecular weight of at least or more than 30 kDa, such as, for example, 35 kDa, 40 kDa, 45 kDa, or 50 kDa.

1u) DOM1 h-131-206-SCDKTH-Trastuzumab Fc

[1048] Provided herein is a TNFR1 antagonist fusion protein, containing the human TNFR1 antagonist dAb DOM1 h-131-206 (SEQ ID NO:59). The C-terminus of DOM1 h-131-206 is fused to a portion of the hinge sequence of trastuzumab, containing at least the sequence of residues SCDKTH (corresponding to residues 222-227 of SEQ ID NO:26), which is fused to the N-terminus of the trastuzumab Fc region (corresponding to residues 234-450 of SEQ ID NO:26; see, also, SEQ ID NO:27). The DOM1 h-131-206-SCDKTH-Trastuzumab Fc fusion protein has the following sequence (SEQ ID NO:722):

EVQLLESGGGLVQPGGSLRLSCAASGFTFAHETMVWVRQAPGKGLEWVSH
IPPDGQDPFYADSVKGRFTISRDNSKNTLYLQMNSLRAEDTAVYHCALLP
KRGPWFDYWGQGTLVTVSSSCDKTHAPELLGGPSVFLFPPKPKDTLMISR
TPEVTCVVVDVSHEDPEVKFNWYVDGVEVHNAKTKPREEQYNSTYRVVSV
LTVLHQDWLNGKEYKCKVSNKALPAPIEKTISKAKGQPREPQVYTLPPSR
EEMTKNQVSLTCLVKGFYPSDIAVEWESNGQPENNYKTTPPVLDSDGSFF
LYSKLTVDKSRWQQGNVFSCSVMHEALHNHYTQKSLSLSPGK

[1049] Alternatively, the SCDKTH hinge sequence is replaced by a portion containing at least 5, 6, 7, 8, 9, 10, or 11 contiguous residues, up to the full sequence of the hinge region of trastuzumab, containing the sequence EPKSCDKTHTCPPCP (corresponding to residues 219-233 of SEQ ID NO:26).

1v) DOM1 h-131-206-GGGGSGGGGSGGGGS-Trastuzumab Fc

[1050] Provided herein is a TNFR1 antagonist fusion protein, containing the human TNFR1 antagonist dAb DOM1 h-131-206 (SEQ ID NO:59). The C-terminus of DOM1 h-131-206 is fused to a GGGGSGGGGSGGGGS peptide linker, which is fused to the N-terminus of the trastuzumab Fc region (corresponding to residues 234-450 of SEQ ID NO:26; see, also, SEQ ID NO:27). The DOM1 h-131-206-GGGGSGGGGSGGGGS-Trastuzumab Fc fusion protein has the following sequence (SEQ ID NO:723):

EVQLLESGGGLVQPGGSLRLSCAASGFTFAHETMVWVRQAPGKGL
EWVSHIPPDGQDPFYADSVKGRFTISRDNSKNTLYLQMNSLRAED
TAVYHCALLPKRGPWFDYWGQGTLVTVSSGGGGSGGGGSGGGGSA
PELLGGPSVFLFPPKPKDTLMISRTPEVTCVVVDVSHEDPEVKFN
WYVDGVEVHNAKTKPREEQYNSTYRVVSVLTVLHQDWLNGKEYKC
KVSNKALPAPIEKTISKAKGQPREPQVYTLPPSREEMTKNQVSLT
CLVKGFYPSDIAVEWESNGQPENNYKTTPPVLDSDGSFFLYSKLT
VDKSRWQQGNVFSCSVMHEALHNHYTQKSLSLSPGK

[1051] Alternatively, the GGGGSGGGGSGGGGS linker is replaced by a Gly-Ser linker, such as a (GSGS)ₙ or a (GGGGS)ₙ linker, where n=1, 2, 3, 4 or 5, or any other suitable short peptide linker as described herein or as known in the art.

1w) DOM1 h-131-206-GGGGSGGGGSGGGGS-SCDKTH-Trastuzumab Fc

[1052] Provided herein is a TNFR1 antagonist fusion protein, containing the human TNFR1 antagonist dAb DOM1 h-131-206 (SEQ ID NO:59). The C-terminus of DOM1 h-131-206 is fused to a GGGGSGGGGSGGGGS peptide linker, which is fused to a portion of the hinge sequence of trastuzumab, containing at least the sequence of residues SCDKTH (corresponding to residues 222-227 of SEQ ID NO:26), which is fused to the N-terminus of the trastuzumab Fc region (corresponding to residues 234-450 of SEQ ID NO:26; see, also, SEQ ID NO:27). The DOM1 h-131-206-GGGGSGGGGSGGGGS-SCDKTH-Trastuzumab Fc fusion protein has the following sequence (SEQ ID NO:724):

EVQLLESGGGLVQPGGSLRLSCAASGFTFAHETMVWVRQAPGKGL
EWVSHIPPDGQDPFYADSVKGRFTISRDNSKNTLYLQMNSLRAED
TAVYHCALLPKRGPWFDYWGQGTLVTVSSGGGGSGGGGSGGGGSS
CDKTHAPELLGGPSVFLFPPKPKDTLMISRTPEVTCVVVDVSHED
PEVKFNWYVDGVEVHNAKTKPREEQYNSTYRVVSVLTVLHQDWLN
GKEYKCKVSNKALPAPIEKTISKAKGQPREPQVYTLPPSREEMTK
NQVSLTCLVKGFYPSDIAVEWESNGQPENNYKTTPPVLDSDGSFF
LYSKLTVDKSRWQQGNVFSCSVMHEALHNHYTQKSLSLSPGK

[1053] Alternatively, the GGGGSGGGGSGGGGS linker is replaced by another Gly-Ser (GS) linker, such as a (GSGS)ₙ or a (GGGGS)ₙ linker, where n=1, 2, 3, 4 or 5, or any other suitable short peptide linker as described herein or as known in the art.

[1054] Alternatively, or additionally, the SCDKTH hinge sequence is replaced by all or a portion containing at least 5, 6, 7, 8, 9, 10, or 11 contiguous residues, up to the full sequence of the hinge region of trastuzumab, containing the sequence EPKSCDKTHTCPPCP (corresponding to residues 219-233 of SEQ ID NO:26).

1al) DOM1 h-131-206-ESKYGPPCPPCP-Nivolumab Fc

[1055] Provided herein is a TNFR1 antagonist fusion protein, containing the human TNFR1 antagonist dAb DOM1 h-131-206 (SEQ ID NO:59). The C-terminus of DOM1 h-131-206 is fused to the hinge sequence of nivolumab, containing the sequence ESKYGPPCPPCP (corresponding to residues 212-223 of SEQ ID NO:29), which is fused to the N-terminus of the nivolumab Fc region (corresponding to residues 224-440 of SEQ ID NO:29; see, also, SEQ ID NO:30). The DOM1 h-131-206-ESKYGPPCPPCP-Nivolumab Fc fusion protein has the following sequence (SEQ ID NO:738):

EVQLLESGGGLVQPGGSLRLSCAASGFTFAHETMVWVRQAPGKGL
EWVSHIPPDGQDPFYADSVKGRFTISRDNSKNTLYLQMNSLRAED
TAVYHCALLPKRGPWFDYWGQGTLVTVSSESKYGPPCPPCPAPEF
LGGPSVFLFPPKPKDTLMISRTPEVTCVVVDVSQEDPEVQFNWYV
DGVEVHNAKTKPREEQFNSTYRVVSVLTVLHQDWLNGKEYKCKVS
NKGLPSSIEKTISKAKGQPREPQVYTLPPSQEEMTKNQVSLTCLV
KGFYPSDIAVEWESNGQPENNYKTTPPVLDSDGSFFLYSRLTVDK
SRWQEGNVFSCSVMHEALHNHYTQKSLSLSLGK

[1056] Alternatively, all or a portion of the nivolumab hinge sequence, containing at least 5, 6, 7, 8, 9, 10, or 11 contiguous residues of the ESKYGPPCPPCP hinge sequence (corresponding to residues 212-223 of SEQ ID NO:29), is included.

### 1am) DOM1h-131-206-GGGGSGGGGSGGGGS-Nivolumab Fc

[1057] Provided herein is a TNFR1 antagonist fusion protein, containing the human TNFR1 antagonist dAb DOM1 h-131-206 (SEQ ID NO:59). The C-terminus of DOM1 h-131-206 is fused to a GGGGSGGGGSGGGGS peptide linker, which is fused to the N-terminus of the nivolumab Fc region (corresponding to residues 224-440 of SEQ ID NO:29; see, also, SEQ ID NO:30). The DOM1 h-131-206-GGGGSGGGGSGGGGS-Nivolumab Fc fusion protein has the following sequence (SEQ ID NO:739):

EVQLLESGGGLVQPGGSLRLSCAASGFTFAHETMVWVRQAPGKGL
EWVSHIPPDGQDPFYADSVKGRFTISRDNSKNTLYLQMNSLRAED
TAVYHCALLPKRGPWFDYWGQGTLVTVSSGGGGSGGGGSGGGGSA
PEFLGGPSVFLFPPKPKDTLMISRTPEVTCVVVDVSQEDPEVQFN
WYVDGVEVHNAKTKPREEQFNSTYRVVSVLTVLHQDWLNGKEYKC
KVSNKGLPSSIEKTISKAKGQPREPQVYTLPPSQEEMTKNQVSLT
CLVKGFYPSDIAVEWESNGQPENNYKTTPPVLDSDGSFFLYSRLT
VDKSRWQEGNVFSCSVMHEALHNHYTQKSLSLSLGK

[1058] Alternatively, the GGGGSGGGGSGGGGS linker is replaced by a (GSGS)ₙ or a (GGGGS)ₙ linker, where n=1, 2, 3, 4, or 5, or any other suitable short peptide linker as described herein or as known in the art.

1an) DOM1 h-131-206-GGGGSGGGGSGGGGS-ESKYGPPCPPCP-Nivolumab Fc

[1059] Provided herein is a TNFR1 antagonist fusion protein, containing the human TNFR1 antagonist dAb DOM1 h-131-206 (SEQ ID NO:59). The C-terminus of DOM1 h-131-206 is fused to a GGGGSGGGGSGGGGS peptide linker, which is fused to the hinge sequence of nivolumab, containing the sequence ESKYGPPCPPCP (corresponding to residues 212-223 of SEQ ID NO:29), which is fused to the N-terminus of the nivolumab Fc region (corresponding to residues 224-440 of SEQ ID NO:29; see, also, SEQ ID NO:30). The DOM1 h-131-206-GGGGSGGGGSGGGGS-ESKYGPPCPPCP-Nivolumab Fc fusion protein has the following sequence (SEQ ID NO:740):

EVQLLESGGGLVQPGGSLRLSCAASGFTFAHETMVWVRQAPGKGL
EWVSHIPPDGQDPFYADSVKGRFTISRDNSKNTLYLQMNSLRAED
TAVYHCALLPKRGPWFDYWGQGTLVTVSSGGGGSGGGGSGGGGSE
SKYGPPCPPCPAPEFLGGPSVFLFPPKPKDTLMISRTPEVTCVVV
DVSQEDPEVQFNWYVDGVEVHNAKTKPREEQFNSTYRVVSVLTVL
HQDWLNGKEYKCKVSNKGLPSSIEKTISKAKGQPREPQVYTLPPS
QEEMTKNQVSLTCLVKGFYPSDIAVEWESNGQPENNYKTTPPVLD
SDGSFFLYSRLTVDKSRWQEGNVFSCSVMHEALHNHYTQKSLSLS
LGK

[1060] Alternatively, the GGGGSGGGGSGGGGS linker is replaced by a (GSGS)ₙ or a (GGGGS)ₙ linker, where n=1, 2, 3, 4, or 5, or any other suitable short peptide linker as described herein or as known in the art. Alternatively, or additionally, all or a portion of the nivolumab hinge sequence, containing at least 5, 6, 7, 8, 9, 10, or 11 contiguous residues of the ESKYGPPCPPCP hinge sequence (corresponding to residues 212-223 of SEQ ID NO:29), is included.

[1061] Also synthesized were Vhh (nanobodies), particularly single chain forms thereof, linked to HSA, that comprises the dAbs, such as DOM1 h-131-206. Exemplary Vhh constructs were assessed for binding and inhibition of TNFR1. These are described in Examples 5-6 below.

### Example 4

Exemplary N-Terminal Fusion Protein of a Single Chain dAB with Human Serum Albumin and the Activities and Properties Thereof

[1062] Presentation in the context of an antibody presents difficulties in the context of inhibition of a target receptor. A bivalent antibody induces dimerization of a target receptor, which can lead to its activation. In some instances, as discussed in the detailed description, this is desirable, it is undesirable for an inhibitor of TNFR1. As described in the detailed description, even transient activation of TNFR1 can give rise to a cytokine storm and significant toxicity. Thus, in the context of this understanding a monovalent inhibitor should be used. To achieve this, monovalent constructs are provided herein (see description throughout, and Example 3 above). As described in the Example below, it is shown herein that there are bivalent constructs, such as the construct designated 1206-bivalent (see Example 5 below), which contains the Ab Dom1h-131-206 of SEQ ID NO:59, where n=2, linked via a linker to modified Fc's does not exhibit agonist activity, and, hence, does not induce dimerization of TNFR1. In contrast the corresponding construct 1208 does have agonist activity. See description below.

[1063] The cytokine network is defined by cascades of cytokines. As described throughout the disclosure herein, tumor necrosis factor a (TNF) is a key cytokine within the network of pro- and anti-inflammatory cytokines. Its role in promoting autoimmune disease is well-documented and discussed throughout the disclosure herein. TNF can trigger its own production as well as the release of interleukin 1 (IL-1), IL-6, IL-8, and other cytokines, which can induce other inflammatory factors. Endotoxins (lipopolysaccharide; LPS) from gram-negative bacteria are potent TNF-α inducers, and can induce sepsis. Viral infection can lead to an immune response that results in a cytokine storm of inflammatory mediators, triggered by TNF. Physical injury, including chemotherapy and surgery, can result in this outcome.

[1064] As described herein, these negative effects primarily are mediated through TNF/TNFR1 interactions. Opposing these effect are effects of TNF binding to its other receptor, TNFR2. TNFR1 is regarded as the proinflammatory TNF receptor; and TNFR2 is regarded as the anti-inflammatory TNF receptor. As discussed herein, TNFR2 has other pathophysiological functions. For instance, TNFR2 is critical for defense against opportunistic pathogens like tuberculosis and for maintenance of cardio myocyte function.

[1065] Commonly used anti-cytokine drugs are the TNF Blockers, such as, for example adalimumab (Humira®), etanercept (Enbrel®) and infliximab (Remicade®). These antibodies bind to TNF and prevent its binding to TNFR1 and to TNFR2. The severe toxicities associated with TNF Blockers are well-documented, and, as described herein, many of these toxicities result from inhibition of TNFR2 function. Constructs and products provided herein are designed to inhibit TNFR1 function, but not the function of TNFR2.

[1066] Constructs provided herein, including Vhh-4, exemplified below, and others are derived from Camelid Vhh domains. Vhh-4 is a Vhh anti-TNFR1 domain fused with the N-terminus of human serum albumin. The resulting construct provides the Vhh domain for blocking TNF, but, unlike prior dAbs, has sufficient half-life in vivo for its use as a therapeutic. Results below demonstrate that constructs, such as Vhh-4, are active in inhibiting TNF effects on cells that is at least as potent as the TNF Blockers adalimumab/Humira® and etanercept/Enbrel®.

[1067] This Example exemplifies the activities and properties of an exemplary construct, which is an N-terminal fusion protein of a single chain dAb with human serum albumin.

### A. Construct

[1068] This Example provides an exemplary nanobody and activities thereof. Nanobodies, as described in the detailed description, are Vhh domain-containing proteins, include only the heavy chain, and do not require cooperativity from a light chain, as is the case for humans and mice (Harmsen et al. (2007) Appl Microbiol Biotechnol. 77:13-22). Because they are a single chain, they must be presented as fusion proteins, such as grafted-CDRs in an antibody format, because of their short half-life on their own as small proteins (~13-15 KDa).

[1069] An exemplary construct was prepared. A phage library was prepared using the method described in Sabir et al. ((2014) Comptes Rendus Biologies 337:244-249). Phage with high affinity binding to the tumor necrosis factor receptor-1 (TNFR1) were recovered and tested for their ability to bind TNFR1, and to compete with binding of human tumor necrosis factor-alpha (TNF-α) for TNFR1 as described in U.S. Published Application No. US20140112929.

[1070] Nucleic acid encoding each of the Vhh antibodies, containing a single chain, was expressed in CHO cells (see Sokolowska-Wedzina et al. (2014) Protein Expression and Purification 99:50-57 for description of expression vector), and each was purified by HPLC chromatography. Sample 1 was a control anti-TNFR1 antibody (H398 from ThermoFisher), Vhh1-4 were Vhh antibodies that contain dAbs. The sequences (see SEQ ID NOs: 54, 1478, 58 and 59) are as follows:

Vhh-1:
EVQLLESGGGLVQPGGSLRLSCAASGFTFDKYSMGWVRQAPGKGL
EWVSQISDTADRTYYAHAVKGRFTISRDNSKNTLYLQMNSLRAED
TAVYYCAIYTGRWVPFEYWGQGTLVTVSS
Vhh-2:
EVQLLESGGGLVQPGGSLRLSCAASGFTFSQYRMHWVRQAPGKSL
EWVSSIDTRGSSTYYADPVKGRFTISRDNSKNTLYLQMNSLRAED
TAVYYCAKAVTMFSPFFDYWGQGTLV
Vhh-3:
EVQLLESGGGLVQPGGSLRLSCAASGFTFVDYEMHWVRQAPGKGL
EWVSSISESGTTTYYADSVKGRFTISRDNSKNTLYLQMNSLRAED
TAVYYCAKRRFSASTFDYWGQGTLVTVSS
Vhh-4:
EVQLLESGGGLVQPGGSLRLSCAASGFTFAHETMVWVRQAPGKGL
EWVSHIPPDGQDPFYADSVKGRFTISRDNSKNTLYLQMNSLRAED
TAVYHCALLPKRGPWFDYWGQGTLVTVSS

The highlighted and underlined Cysteines (C) in Vhh-4, and the corresponding cysteines in the other Vhh chains form a loop, whereby the Vhh is a constrained polypeptide. The proline at amino acid residue 14 can be replaced by alanine.

[1071] Expression cassettes encoding the Vhh domain antibody fragments were prepared and expressed, and purified by HPLC chromatography. The Table below shows the expression levels of each test Vhh antibody. Two molecules required a His tag for purification. Results are shown in the following Table:

TABLE 13
Expression and Yield Results for Vhh 1-4

| Item | Description | Tag | Harvest | Yield |
|---|---|---|---|---|
| Sample | Anti-human TNFRSF1A therapeutic | His | 146 μg | Abt. 1 |
| 1 | antibody scFv fragment (H398)* | | | mg/L |
| Vhh-1 | Recombinant human anti-TNFRSF1A | None | 500 μg | 30 |
| | single domain antibody | | | mg/L |
| Vhh-2 | Recombinant human anti-TNFRSF1A | His | 1000 μg | 49.4 |
| | single domain antibody | | | mg/L |
| Vhh-3 | Tandem scFV bispecific antibody | None | 500 μg | 42 |
| | | | | mg/L |
| Vhh-4 | Tandem scFV bispecific antibody | None | 500 μg | 51 |
| | (see SEQ ID NO: 1475) | | | mg/L |

*TNF receptor superfamily member 1A antibody H398 (ThermoFisher; H398 comprises SEQ ID NO: 678).

[1072] Each of Vhh 1-4 subsequently was tested in binding studies using the surface plasmon resonance (SPR) method (Sciences GL. Biacore Assay Handbook. General Electric Company (2012); and Richter et al. (2019) MAbs 11:166-177). Competition assays of Vhh inhibition of TNF-α binding to TNFR1 extracellular domain also were performed as described in Richter et al. (2019). Inhibition of TNF-induced expression of VCAM or IL8, which are comparable assays, were performed as described by Lin et al., (2015) J Biomed Sci 22: 53; and Sonnier et al. (2010) Journal of Gastrointestinal Surgery 14:1592-1599, respectively.

[1073] A summary of the results is presented in the Table below. The results show that Vhh-4 has a very high affinity for the extracellular domain of TNFR-1 (6.6×10⁻¹³ M); it was 100% competitive for TNF binding to TNFR1 (IC50~1 nM), and was the most efficient of the 4 candidates at inhibiting TNF-induced VCAM-1 synthesis (0.3 nM). Of these Vhh dAb antibodies tested, Vhh-4 performed the best and a construct containing the Vhh-4 and HSA was prepared.

[1074] The sequence below represents the construct (SEQ ID NO:1475) containing Vhh-4: the dAb portion is residues 20-138 of SEQ ID NO:1475, linked via a Gly-Ser linker (residues 139-147 of SEQ ID NO:1475) to human serum albumin (HSA; residues 148-732 of SEQ ID NO:1475).

EVQLLESGGGLVQPGGSLRLSCAASGFTFAHETMVWVRQAPGKGL
EWVSHIPPDGQDPFYADSVKGRFTISRDNSKNTLYLQMNSLRAED
TAVYHCALLPKRGPWFDYWGQGTLVTVSS . . . HSA. . . .

TABLE 14
Comparative binding and competition assays
(Results with the control antibody not shown*)

| | Kd | TNF competition | TNF Dependent |
|---|---|---|---|
| Sample | (Molar by SPR) | (maximum) | Bioassay (IC50) |
| Vhh-1 | 4.3 × 10⁻¹⁰ | Partial (33%) | IL-8 (500 nM) |
| Vhh-2 | 1.0 × 10⁻⁶ | Non-competitive | VCAM (3 nM) |
| Vhh-3 | 5.7 × 10⁻¹⁴ | Partial (34%) | IL-8 (1 nM) |
| Vhh-4 | 6.6 × 10⁻¹³ | Competitive (100%) | VCAM (0.3 nM) |

*amount of antibody recovered was de minimis

### B. Results

[1075] The exemplary construct containing the Vhh-4 antibody linked to HSA was shown to have activity as a TNFR1 antagonist. It blocked TNFR1 as shown by a significant reduction in IL-6 and IL-8 gene expression in THP1 cells stimulated with LPS. 3×10⁵ THP1 cells were treated with 5 μg and 20 μg, and 0 μg as a control, of the construct for 30 min, followed by LPS (10 ng/ml) stimulation for 4 hours. RNA samples were collected, and qPCR analysis was performed to analyze IL-6 and IL-8 gene expression using the housekeeping gene hypoxanthine-guanine phosphoribosyltransferase (HPRT) as an internal control. The results show that both doses significantly reduced IL-6 and IL-8 expression (n=3, mean±SEM; *p<0.05, **p<0.01, ***p<0.001).

[1076] In other experiments, the effects on inflammatory cytokine expression of Vhh-4 on TNF-α stimulated THP-1 cells were compared to the effects of each of etanercept/Enbrel® and adalimumab/Humira©. 3×10⁵ THP1 cells were treated with 20 μg of Vhh-4, etanercept/Enbrel®, or adalimumab/Humira©, followed by TNF-α (50 ng/mL) simulation for 7 hours. RNA samples were performed and qPCR analysis was performed to IL-6, IL-8, and TNF-α gene expression, using the HPRT, a housekeeping gene product, as an internal control. Results, which are shown in FIG. 6 demonstrate that the Vhh-4 construct is at least as potent as etanercept/Enbrel® and adalimumab/Humira©. In other experiments, this construct had an IC₅₀ of about 9 nM.

### Example 5

Exemplary Vhh Domains and Fusion Proteins their Preparation and Properties Thereof

[1077] Various additional Vhh domains and fusion proteins were prepared to assess their properties. The results explain the clinical failure of prior art constructs, such as the dAbs (discussed and described in the Detailed Description) that contain a Vhh linked to anti-human serum albumin to bind the Vhh to human serum albumin.

### Materials

[1078] Synthesized Vhh domain proteins had the following sequences. The signal peptide in each construct is residues 1-19, linked for expression to a Vhh domain as follows:

[1079] Signal Peptide for secretion, MEWSWVFLFFLSVTTGVHS SEQ ID NO:1476, is a mouse immunoglobulin heavy-chain leader sequence (Uniprot: A0N1R). Other signal sequences can be used in its place as appropriate for expression in a cell.

### Constructs

206
(SEQ ID NO: 1493)
MEWSWVFLFFLSVTTGVHSEVQLLESGGGLVQPGGSLRLSCAASG
FTFAHETMVWVRQAPGKGLEWVSHIPPDGQDPFYADSVKGRFTIS
RDNSKNTLYLQMNSLRAEDTAVYHCALLPKRGPWFDYWGQGTLVT
VSSGGGGAGGGGHHHHHHHHHH
Residues 20-138 are amino acid residues 1-119
of SEQ ID NO: 59
541(208)
(SEQ ID NO: 1494)
MEWSWVFLFFLSVTTGVHSEVQLLESGGGLVQPGGSLRLSCAASG
FTFDKYSMGWVRQAPGKGLEWVSQISDTADRTYYAHAVKGRFTIS
RDNSKNTLYLQMNSLRAEDTAVYYCAIYTGRWVPFEYWGQGTLVT
VSSGGGGAGGGGHHHHHHHHHH
Residues 20-138 correspond to amino acid residues
1-119 of SEQ ID NO: 38
208a
(SEQ ID NO: 1495)
MEWSWVFLFFLSVTTGVHSEVQLLESGGGLVQPGGSLRLSCAASG
FTFDKYSMGWVRQAPGKGLEWVSQISDTADRTYYAHAVKGRFTIS
RDNSKNTLYLQMNSLRAGGGGAGGGGHHHHHHHHHH
Residues 20-107 correspond to amino acid residues
1-88 of SEQ ID NO: 38
019
(SEQ ID NO: 1496)
MEWSWVFLFFLSVTTGVHSQVQLQESGGGVVQPGGSLTLSCTRTG
LTPSTGAVGWYRQAPGKKCELVSYITIPSGRTTYTDSVKGRFAIS
RDKAKNTVFLQMNSLKPEDTALYYCGDVPYSTIQAMCTDDGPWGQ
GTQVTVSSGGGGAGGGGHHHHHHHHHH
Residues in italics are the same as SEQ ID NO: 40
in WO2021/256254 with one
change, a V, which is underlined.

### Methods

### Protein Expression

[1080] His-tagged proteins were expressed using a high expression mammalian vector transfected in suspension CHO cells and purified using Immobilized Metal Affinity Chromatography. Each completed construct was sequence-confirmed before proceeding to DNA scale-up. Suspension CHO cells (TunaCHO™) were seeded in a shake flask and expanded using a serum-free and chemically defined medium. On the day of transfection, the expanded cells were seeded into a new vessel with fresh medium. After transfection, the cells were maintained as a batch-fed culture until the end of the production run. There was no detectable 208a fragment in the medium of the cultured cells transfected with the corresponding construct. The Vhh domain in the 206 construct is the same as the domain in the Vhh-4-human serum albumin construct in Example 4.

### Plasmid DNA Scale-up

[1081] Each DNA expression construct was scaled up for transfection. Uncut plasmid DNA was analyzed by agarose gel electrophoresis and quality was assessed. Plasmid DNA was sequence-confirmed before proceeding to transfection.

### CHO Transient Transfection (TunaCHO™ Process)

[1082] Suspension CHO cells were seeded in a shake flask and expanded using a serum-free and chemically defined medium. On the day of transfection, the expanded cells were seeded into a new vessel with fresh medium. After transfection, the cells were maintained as a batch-fed culture until the end of the production run.

### IMAC (Immobilized Metal Affinity Chromatography) Purification of His Tagged PROTEIN

[1083] Clarified and buffered conditioned medium from the production run was loaded onto an IMAC column pre-equilibrated with binding buffer. Washing buffer containing 40 mM imidazole was passed through the column until the OD280 value returned to baseline. The target protein was eluted with a linear gradient of increasing imidazole concentration up to 0.5 M. The eluate was collected in fractions, and the OD280 value of each fraction was recorded. Denaturing capillary electrophoresis (CE-SDS, LabChip GXII, Perkin Elmer) of each fraction was performed and analyzed. Fractions containing the target protein were pooled and dialyzed into the client-specified buffer. The protein was filtered through a 0.2 μm membrane filter and the protein concentration was calculated using the OD280 value and the calculated extinction coefficient. Refer to the “Proteins Produced and Aliquots” section for a summary of the protein yield and corresponding information.

CE-SDS (Capillary Electrophoresis using Sodium Dodecyl Sulfate) Analysis

[1084] CE-SDS analysis of the target protein was performed using a LabChip GXII (Perkin Elmer). Refer to the Certificate of Analysis for results.

### SE-UPLC (Size Exclusion-Ultra High Pressure Liquid Chromatography) Analysis

[1085] SE-UPLC analysis of the target protein was performed. SEC standards (MEDNA, Y3101) were chromatographed as a reference for protein sizes. Refer to the Sample Analysis Report for more details and results.

### Protein Purification

[1086] Clarified and buffered conditioned medium from each production run was loaded onto an IMAC column pre-equilibrated with binding buffer. Washing buffer containing 40 mM imidazole was passed through the column until the OD280 value returned to baseline. The target protein was eluted with a linear gradient of increasing imidazole concentration up to 0.5 M. The eluate was collected in fractions, and the OD280 value of each fraction was recorded. Denaturing capillary electrophoresis (CE-SDS, LabChip GXII, Perkin Elmer) of each fraction was performed and analyzed. Fractions containing the target protein were pooled and dialyzed into the client-specified buffer (PBS (137 mM NaCl, 2.7 mM KCl, 10 mM Na2HPO4, 2 mM KH2PO4, pH 7.4). The protein was filtered through a 0.2 m membrane filter and the protein concentration was calculated using the OD280 value and the calculated extinction coefficient.

The pI of each of the proteins was calculated:
[1087] 206: theoretical pI of 6.69
[1088] 541 (208): theoretical pI of 7.22
[1089] 208a
[1090] 019: theoretical pI of 7.79
[1091] The Vhh-4-HSA fusion protein (SEQ ID NO:1475) has a theoretical pI of 5.75.

[1092] This is of interest because at the pI (isoelectric point) the negative and positive charges in a protein are balanced reducing repulsive electrostatic forces, and the attraction forces predominate, causing aggregation and precipitation (see, e.g., Proteomic Profiling and Analytical Chemistry (Second Edition), 2016). Proteins that have a pI close to the pH of blood (pH 7.4) will aggregate; hence the Vhh domains, which have a pH close to that of blood, will aggregate upon administration. The fusion protein with HSA has much lower pI, and will not aggregate.

### Results

### Vhh Proteins

[1093] Post IMAC purification the proteins were buffer exchanged to 20 mM Histidine 150 mM NaCl pH 6.0 and yield obtained were ~19 mg of 206, ~4 mg of 541(208) and ~23 mg of 019; however, no target protein was captured and enriched for208a. No detectable level of 208a in the CM was observed based on CE-SDS analysis.

[1094] Proteins were buffer exchanged to PBS pH 7.4. Post buffer exchange the final yield obtained were 10.76 mg of 206, 1.04 mg of 541(208), and 20.67 mg of 019. SE-UPLC analysis was performed and 019 was observed to contain >99% monomers. SE-UPLC results 206 and 541(208) were inconclusive, which might have been caused by column interactions. SE-UPLC analysis was performed and all proteins. The results showed a very significant loss of proteins post buffer exchange for 206 due to aggregation.

### Vhh-4 Human Serum Albumin Construct

[1095] The Vhh-4 construct in Example 4, contains the same Vhh domain as 206 above, which has a pI close to that of blood, and which aggregated. The DNA encoding the construct described in Example 4 (Vhh-4 linked to human serum albumin) was cloned into the high expression mammalian vector and the DNA sequences of the gene insert were confirmed. Each DNA construct was scaled up for transfection and the DNA sequence was confirmed after DNA scale-up. A 0.1 liter transient production was completed in CHO cells (TunaCHO™ extended 14-day process). The protein was purified by Anti-Albumin purification and 26.75 mg (1.07 mg/mL) the Vhh-4 fusion protein were obtained. CE-SDS analysis was performed. SE-UPLC analysis was performed and all proteins were observed to contain >97% monomers. No aggregates were observed indicating that fusion Vhh-4-HSA maintains the unaggregated form of Vhh-4.

[1096] These results provide insights into the clinical failure of the prior art constructs that contained the Vhh domains linked to an anti-human serum albumin. As occurred in buffer at pH 7.4, for 206 and the other domains, as described above, exposure to serum, which has a pH of about 7.4, in vivo can induce aggregation, resulting in rapid clearance and very little or no association of a Vhh-4 protein with the targeted free human serum albumin. Constructs provided herein in which the unaggregated form of the Vhh-4 protein is maintained, solve this problem.

### Example 6

Engineering and Production of EN1206 Variants Protein engineering

[1097] EN1206-MV and EN1206-BV are VHH-Fc fusion proteins that were engineered for in vivo half-life extension. To do so, a triple mutation of YTE (M252Y/S254T/T256E) was engineered in the Fc portion of the fusion protein. A second triple mutation was also made in the Fc for the purpose of silencing the antibody effector function. These mutations are known as “LALAPG,” which refers to the re[placements, by EU numbering: L234A/L235A/P329G. A review article for YTE and LALAPG is (frontiersin.org/articles/10.3389/fimmu.2019.01296/full). The Fc portions of EN1206-MV has the Knob-into-Hole mutations to facilitate its heterodimer pairing (see FIG. 8A for a depiction of the structures of EN1206-MV and -BV).

[1098] To eliminate crosslinking of FcγRs on T cells to alleviate the cytokine induction from T cells the Fc region of antibodies has been modified to eliminate FcγR binding (see, e.g., Saunders (2019) Front. Immunol., Sec. Comparative Immunology 10 doi.org/10.3389/fimmu.2019.012) A single mutation of Leu235Glu is sufficient to knockout binding to Fc receptors. A 100-fold reduction in binding to FcγR also results in lower T cell activation and proliferation in the presence of the Leu235Glu Fc mutant IgG1. The combination of Leu234Ala and Leu235Ala (called LALA mutations) eliminates FcγRIIa binding (see Table below). These two mutations eliminate detectable binding to FcγRI, IIa, and IIIa for IgG1 and for IgG4. LALA is more effective than either Leu234Ala or Leu235Ala alone. Some groups have seen that the Leu235Glu mutation knocks out FcγRI. Single and double mutations at position 234 and 235 reduced ADCC activity mediated by PBMCs and nearly ablated ADCC mediated by monocytes, the LALA mutations have been tested in humans in a phase I clinical trial. A pairing, in addition to the LALA pairing, is Ser228Pro paired with Leu235Glu, which has been called the SPLE or PE mutations. The SPLE mutations have been introduced into IgG4, which has low binding to FcγR initially perhaps due to the Phe234 residue that differs from Leu234 found in IgG1. (This combination has been shown by surface plasmon resonance to dramatically reduce FcγRI binding to IgG Fc to barely detectable levels without reducing circulating half-life in rats. The effect of the Ser228Pro improves stability of IgG4. Table 3 reproduced from Saunders (2019) Front. Immunol., Sec. Comparative Immunology Volume 10, doi.org/10.3389/fimmu.2019.01296:

| | | | Reduced |
|---|---|---|---|
| | Abbreviated | | effector |
| Modifications or mutations | name | Phenotype | function |
| Leu235Glu | LE | Decreases binding to cell surface | ADCC |
| | | FcyRs | |
| Leu234Ala/Leu235Ala | LALA | Decreases binding to FcyRI, II, III | ADCC |
| | | | ADCP |
| | | | CDC |
| Ser228Pro/Leu235Glu | SPLE in IgG4 | Decrease FcyRI binding | |
| | | Half-life unchanged | |
| Leu234Ala/Leu235Ala/Pro329Gly | LALA-PG | Eliminates binding to FcyR1, II, | ADCP |
| | | Ill, C1q | |
| Pro331Ser/Leu234Glu/Leu235Phe | TM | Decreases binding to FcyR1, II, III | CDC |
| | | and | |
| | | C1q | |
| Asp265Ala | DA | Decreases binding to FcyR1, II, III | ADCC |
| | | | ADCP |
| Gly237Ala | | Decreases binding to FcyRII | ADCP |
| Glu318Ala | | Decreases binding to FcyRll | ADCP |
| Glu233Pro | | Decreases binding to FcyRI, II, | |
| | | and III | |
| Gly236Arg/Leu328Arg | GRLR | Decreases binding to all FcyR | ADCC |
| IgG2-IgG4 cross-subclass | IgG2/G4 | Decreases binding to FcyRs and | |
| | | C1q | |
| His268Gln/Val309Leu/Ala330Ser/Pro3 | IgG2m4 | Decreases binding to all FcyR | ADCC |
| 31Ser | | | |
| | | Decreases Cig binding | ADCP |
| | | | CDC |
| Va1234A1a/Gly237Ala/Pro238Ser/ | IgG2a | Near complete elimination of | ADCC |
| His268AlaNa1309Leu/Ala330Ser/Pro331Ser | | FcyRI, Ila, Ilb, and Ills binding | ADCP |
| | | Decreases C1q binding | CDC |
| | | Binds FcRn | |
| Leu234Ala/1235Ala/Gly237Ala/P238 | IgGla | Near complete elimination of | ADCC |
| Ser/His268Ala/Ala330Ser/Pro331Ser | | FcyR1, Ila, Ilb, and Ills binding | CDC |

[1099] A Pro329Gly mutation has been added to the LALA mutations; this mutation inhibits binding to murine FcγRI, II, and III by IgG2a Fe. The amino acid at 329 was changed, because this residue makes contact with Trp108 and Trp131 of FcγRIIIa. The LALA-PG is an improvement over LALA mutations alone because they nullify Fc function in mouse and human IgG; LALA alone retains murine FcγRIII binding to murine IgG2a. As a result, the LALA-PG mutations are that observed results in murine models more accurately translate to humans since the mutations confer a similar phenotype for both murine IgG2a and human IgG1.

### Production of Variants Provided Herein

[1100] The constructs designated EN1206-MV (KiH-YTE-LALAPG) and EN1206-By (YTE-LALAPG) were produced through transient expression in CHO cells at 1 liter scale. Their expression levels, purity, and total yields were excellent. The proteins are currently stored at WuXi for future delivery. A summary table is shown below to demonstrate the protein sizes and their purities.

| | | | | Final | |
|---|---|---|---|---|---|
| | | | | Concentration | mL/ |
| | Total yield/L | Purity | Endotoxin | (mg/mL) | vial |
| EN1206-MV | 1445.76 mg | 99.6% | <0.11 EU | 10.4 | 4 |
| EN1206-BV | 2228.08 mg | 98.2% | <0.07 EU | 7.96 | 4 |

[1101] Four VHH and VHH-Fc fusion proteins were tested to determine the extent of TNFR1 and TNFR2 binding (See exemplary schematic constructs in FIGS. 8A and 8B). Sequences are set forth below. The leader sequences, which are underlined, are included for trafficking upon expression, and are cleaved, and not included in the constructs when isolated.
[1102] 1) EN-1000-206 (‘206’—a VhH single domain polypeptide); see FIG. 8A, top left panel.
[1103] 2) EN-1206-Fc-MV (a knobs in hole construct pairing an IgG1 Fc-only domain to a fusion of 206-IgG1-Fc); see FIG. 8B, left-most panel.
[1104] 3) EN-1206-Fc-BV (homodimeric/bivalent 206-IgG1-Fc); see FIG. 8B, center panel.
[1105] 4) EN-1208-Fc-BV: Same as EN-1206-Fc-BV except the VhH domain was EN-1000-208 (containing the dAb of SEQ ID NO:54), a different VhH domain fused with IgG1-Fc to form a bivalent antibody-like protein. 1208 is binds to a different epitope on TNFR1 than EN-1206 constructs. See FIG. 8B, right most panel.

### Summary of Results and Methods

[1106] Experiment Section 1: Engineering, Production and Target Binding of the Constructs

[1107] Three VHH/Fc fusion proteins were engineered and produced; about 30 mg each was prepared. The constructs are the one-armed EN-1206-Fc-MV (also referred to as 206 VHH-KiH Fc or EN1206-MV), EN-1206-Fc-BV (206VHH Fc or EN1206-BV), and EN-1208-Fc-BV (also referred to as 208 VHH-Fc or EN1208-BV). Schematic constructs are depicted in FIGS. 8A and 8B. In the table below the constructs are collectively referred to as EN1000.

[1108] Three of the EN1000 proteins were manufactured by CreativeBio. The manufacturing specifications, purity and formulation are presented in the Table below:

TABLE EN1000
Protein Yield and Purity

| | Yield (mg) | mg/vial | Total vial | Purity | Endotoxin | Formulation |
|---|---|---|---|---|---|---|
| EN1206-OA | 30 | 1 | 30 | 94 | <1 EU/mg | PBS, pH 7.4 |
| EN1206 | 30 | 1 | 30 | 94 | <1 EU/mg | PBS, pH 7.5 |
| EN1208 | 30 | 1 | 30 | 99 | <1 EU/mg | PBS, pH 7.6 |

SEQ ID NO: 1488
>EN1206 monovalent seq1_-hole
Fc only, Hole (T366S, L368A, Y407V), YTE (M252Y, S254T, T256E),
LALAPG (L234A, L235A, P329G)
MGWSCIILFLVATATGVHSDKTHTCPPCPAPEAAGGPSVFLFPPKPKDTLYITREPEVT
CVVVDVSHEDPEVKFNWYVDGVEVHNAKTKPREEQYNSTYRVVSVLTVLHQDWL
NGKEYKCKVSNKALGAPIEKTISKAKGQPREPQVYTLPPSRDELTKNQVSLSCAVKG
FYPSDIAVEWESNGQPENNYKTTPPVLDSDGSFFLVSKLTVDKSRWQQGNVFSCSVM
HEALHNHYTQKSLSLSPGK
SEQ ID NO: 1489
>EN1206 monovalent seq2_-knob
One-armed VHH-Fc, Knob (T366W), YTE (M252Y, S254T, T256E),
LALAPG
(L234A, L235A, P329G)
MGWSCIILFLVATATGVHSEVQLLESGGGLVQPGGSLRLSCAASGFTFAHETMVWV
RQAPGKGLEWVSHIPPDGQDPFYADSVKGRFTISRDNSKNTLYLQMNSLRAEDTAVY
HCALLPKRGPWFDYWGQGTLVTVSSDKTHTCPPCPAPEAAGGPSVFLFPPKPKDTL
YITREPEVTCVVVDVSHEDPEVKFNWYVDGVEVHNAKTKPREEQYNSTYRVVSVLT
VLHQDWLNGKEYKCKVSNKALGAPIEKTISKAKGQPREPQVYTLPPSRDELTKNQVS
LWCLVKGFYPSDIA VEWESNGQPENNYKTTPPVLDSDGSFFLYSKLTVDKSRWQQG
NVFSCSVMHEALHNHYTQKSLSLSPGK
SEQ ID NO: 1490
>EN1206 bivalent
YTE (M252Y, S254T, T256E) LALAPG (L234A, L235A, P329G)
MGWSCIILFLVATATGVHSEVQLLESGGGLVQPGGSLRLSCAASGFTFAHETMVW
VRQAPGKGLEWVSHIPPDGQDPFYADSVKGRFTISRDNSKNTLYLQMNSLRAEDTAV
YHCALLPKRGPWFDYWGQGTLVTVSSDKTHTCPPCPAPEAAGGPSVFLFPPKPKDT
LYITREPEVTCVVVDVSHEDPEVKFNWYVDGVEVHNAKTKPREEQYNSTYRVVSVL
TVLHQDWLNGKEYKCKVSNKALGAPIEKTISKAKGQPREPQVYTLPPSRDELTKNQV
SLTCLVKGFYPSDIAVEWESNGQPENNYKTTPPVLDSDGSFFLYSKLTVDKSRWQQG
NVFSCSVMHEALHNHYTQKSLSLSPGK
SEQ ID NO: 1491
>EN1208 YTE-LALAPG
YTE (M252Y, S254T, T256E) LALAPG (L234A, L235A, P329G)
MGWSCIILFLVATATGVHSEVQLLESGGGLVQPGGSLRLSCAASGFTFDKYSMGWV
RQAPGKGLEWVSQISDTADRTYYAHAVKGRFTISRDNSKNTLYLQMNSLRAEDTAV
YYCAIYTGRWVPFEYWGQGTLVTVSSDKTHTCPPCPAPEAAGGPSVFLFPPKPKDTL
YITREPEVTCVVVDVSHEDPEVKFNWYVDGVEVHNAKTKPREEQYNSTYRVVSVLT
VLHQDWLNGKEYKCKVSNKALGAPIEKTISKAKGQPREPQVYTLPPSRDELTKNQVS
LTCLVKGFYPSDIAVEWESNGQPENNYKTTPPVLDSDGSFFLYSKLTVDKSRWQQGN
VFSCSVMHEALHNHYTQKSLSLSPGK
SEQ ID NO 54:
Polypeptide sequence of Dom 1h-574-208
SEQ ID NO: 54 (also SEQ NO: 651 and 667)
EVQLLESGGGLVQPGGSLRLSCAASGFTFDKYSMGWVRQAPGKGLEWVSQISDTAD
RTYYAHAVKGRFTISRDNSKNTLYLQMNSLRAEDTAVYYCAIYTGRWVPFEYWGQ
GTLVTVSS
SEQ ID NO: 1492 Polypeptide sequence of DOM1h-131-206
(also SEQ ID NO: 59)
EVQLLESGGGLVQPGGSLRLSCAASGFTFAHETMVWVRQAPGKGLEWVSHI
PPDGQDPFYADSVKGRFTISRDNSKNTLYLQMNSLRAEDTAVYHCALLPKRG
PWFDYWGQGTLVTVSS

[1109] Knob-into-hole mutations are engineered into the monovalent EN1206-MV for its heterodimer paring. YTE mutations are engineered into the Fe to extend its in vivo half-life of the constructs. The LALAPG mutations also are engineered into the Fes to minimize its in vivo Fe effector function.

Target Binding with Protein A Sensor Chip

[1110] The following shows that these three VHH/Fc proteins above bind only the TNF receptor type 1 (TNFR1) but not TNF receptor type 2 (TNFR2), and that the binding to TNFR1 blocks the binding of the TNFR1 ligands (TNF-α and lymphotoxin (TNF-β)) to TNFR1.

### SPR Binding Format

[1111] Series S Sensor Chip Protein A (Cytiva #29127556) was used to immobilize the Fc portion of the VHH/Fc proteins. The human soluble TNFR1 and TNFR2 are used for the SPR binding flow.

### Results:

[1112] EN1206-MV and EN1206-BV bind TNFR1 with high affinity, while EN1208 shows no binding to TNFR1 (FIG. 9 and Table A below). The EN1208 results were repeated with a non-protein A Chip to rule out a known interaction of protein A with VH3-like domain (in which the VhH antigen-binding regions are embedded). There is no binding of the three EN1000 proteins to TNFR2 (data not shown).

TABLE A
SPR Human TNFR1 Binding Assay Results Using Protein A Chip

| Immobilized | Analyte | | | | |
|---|---|---|---|---|---|
| VHH-Fc | (Concentration) | Ka | Kd | KD(M) | Fit Model |
| EN1206-MV | TNFR1 | 4.27E+05 | 1.66E−04 | 3.88E−10 | 1:1 binding |
| | (0.781-100 nM) | | | | |
| EN1206-BV | TNFR1 | 3.24E+05 | 5.99E−05 | 1.85E−10 | 1:1 binding |
| | (0.781-100 nM) | | | | |
| EN1208-BV | TNFR1 | n/a | n/a | No Binding | — |

### ELISA Competitive Binding

[1113] The TNFR1 ligands TNF-α and lymphotoxin (TNF-β) are immobilized on the ELISA plate. The TNFR1 binding was performed in the presence of increasing amounts of the VHH/Fc proteins. It is demonstrated that the binding of TNFR1 to the immobilized TNF-α or lymphotoxin (TNF-β) can be blocked by either EN1206-MV (also referred to EN1206-OA for “one-armed), or EN1206, or EN1208 in a dose-dependent manner (FIG. 12B). This result further suggests that there is an artifact resulting in the apparent non-binding of EN-1208-Fc-BV to TNFR1 as otherwise it is difficult to understand how it can compete with TNF binding to TNFR1.

Target Binding using a CM5 Sensor Chip

### Background

[1114] SPR binding starts with choosing a matching sensor chip. Previous SPR binding of EN1206 and EN1208 used a protein A sensor chip. The known interaction between protein-A and V_{H}3-like domains (cytivalifesciences.com/en/us/solutions/bioprocessing/knowledge-center/vh3-and-fc-fragment-binding-to-protein-a). Therefore, the binding assay was repeated with a non-protein A sensor chip, CM5.

### Materials and Methods

[1115] CM5 sensor chip (Cytiva #BR100530) was coated with an anti-human IgG (Fc) antibody (Cytiva #29234600) to capture the EN1206-BV and EN1208-BV. The human soluble TNFR1 was used as analyte for binding flow.

### Results and Discussion

[1116] The SPR binding of EN1206 and EN1208 to the soluble TNFR1 using the CM5 sensor chip is shown in FIG. 10 and Table B below. Exemplary data in FIG. 10 and Table B below show that the constructs EN-1206-BV and EN-1208-BV bind TNFR1 but not TNFR2. EN-1206-BV demonstrates higher binding affinity for hTNFR-1 than EN-1208-BV. EN1208-BV has a slower on-rate resulting in a ~100× poorer affinity (KD) than that of EN1206-BV.

TABLE B
SPR Human TNFR1 Binding Assay Results Using CM5 Chip

| Immobilized | | | | |
|---|---|---|---|---|
| VHH-Fc | Analyte | Ka | Kd | KD(M) |
| EN1206-BV | TNFR1 | 1.15E+06 | 1.71E−03 | 1.49E−09 |
| EN1208-BV | TNFR1 | 9.46E+03 | 2.12E−03 | 2.24E−07 |
| EN1206-BV | TNFR2 | n/a | n/a | No Binding |
| EN1208-BV | TNFR2 | n/a | n/a | No Binding |

Experiment Section 2: EN1206 is a potent TNFR1 antagonist Background

[1117] Anti-TNF-α treatment such as Adalimumab blocks both TNFR1 (inflammatory) and TNFR2 (anti-inflammatory) resulting in serious side effects. TNFR1-specific antagonistic constructs provided herein benefit broader patient populations.

### Materials and Methods

[1118] THP1 monocytic leukemia cell line is the test cell line and is used in experiments that measure the expression of inflammatory cytokines in vitro under laboratory conditions. Anti-TNFR1 agents used are 1) EN206 (206): a humanized single domain VHH (nanobody) that binds to domain 4 of TNFR1; 2) EN1206: a bivalent 206/Fc fusion protein; 3) EN1208: a bivalent 208/Fc fusion protein, wherein 208 is a humanized nanobody binding to domain 3 of TNFR1; and 4) EN1206-MV: a one-armed (monovalent) 206/Fc bearing the Knob-into-Hole mutations. TNF-α was purchased. The treated cells were subject to RNA extraction followed by qPCR analysis of the TNF-α-induced gene expression of CXCL8 (IL-8) and TNF-α.

[1119] The 5×10⁵ THP1 cells were treated with indicated dose of anti-TNFR1 agents for 30 min, followed by TNF-α (100 ng/ml) stimulation for 6 hr. The RNA samples were collected, and qPCR analysis was performed to analyze genes expression using HPRT as internal control (n=3, mean±SEM). The treated cells were subject to RNA extraction followed by qPCR analysis of the TNF-α-induced gene expression of CXCL8 (IL-8) and TNF-α.

### Results and Discussion

### THP1 Assay

[1120] The THP1 cell line, an in vitro cell model for immune modulation study, was treated with the anti-TNFR1 agents including the 206, EN1206-Fc-BV (IgG1 Fc fusion in bivalent format; EN1208-Fc-BV and EN1206-Fc-MV. After 30 min, the cells were further treated with or without TNF-α for 6 hours. Expression of the TNF-a-inducible genes CXCL8(IL8) and TNF-α were analyzed by qPCR using HGPRT as internal control (FIG. 13C).

[1121] The results (FIGS. 13A-13C) showed that EN1206 and EN1206-OA are more potent than the 206 (the dAb) in inhibiting CXCL8 and TNF-α gene expression following TNF-α stimulation. The results also show that EN1208 alone induces CXCL8 and TNF-α gene expression. The results show that EN1206, such as EN-1206-FC-BV and EN-1206-FC-MV, are potent TNFR1 antagonists. Such antagonists can be used as next generation treatments for autoimmune diseases, disorders, and/or conditions in which TNF-α plays a role. In contrast, the results show that EN-1208 is an agonist of the TNF-α mediated gene expression. A difference between the EN1206s and the EN1208s is the epitope with which each interacts (see, Example below).

[1122] FIG. 13C shows data plotted as relative gene expression of either IL8/CXCL8 or TNF of 206 dAb, EN1206-Fc-MV, and EN1206-Fc-BV, as measured by qPCR. THP1 cells (5×10⁵) were treated with test reagents at concentrations of 1 nM, 3 nM, and 10 nM for 30 minutes, followed by TNF (100 ng/ml) stimulation for 6H. RNA was extracted and qPCR analysis was performed to analyze gene expression of IL-8 or TNF using HPRT as an internal control (n=3, mean+/−SEM). For I1L8, 1 nM 206dAB is 8-fold the baseline (Value=1 horizontal line). The 1 nM value for EN-1206-Fc-MV is 1.75, and EN-1206-Fc-BV is 1.75. The background subtracted values are shown in the Table inserted into FIG. 13C. CXCL8(IL8) was inhibited by EN-1206-Fc-MV and EN-1206-Fc-BV, while EN-1000-206-VhH (EN206) showed inhibition of gene expression to a lesser extent. EN-1208 acted as an agonist by inducing both CXCL8 and TNF.

[1123] All three molecules, EN-1000-206 dAb, EN-1206-Fc-MV and EN-1206-Fc-BV, suppress TNF-induced IL8 and TNF gene expression in THP1 monocytic leukemia cells in vitro in a dose dependent manner. The 206 dAb has been employed characterized previously in a double-domain antibody (ddAb) with the structure anti-TNFR1 dAb-(spacer)-anti-HSA dAb (Jakopin et al., Int. J. Mol. Sci. 2019, 20, 4265). The affinity of the anti-HSA portion is reported as 34 nM. The purpose of ddAb binding to HSA is to obtain an HSA-like half-life for the fusion protein. Cordy et al., Clinical and Experimental Immunology, 182: 139-148 (2015), report that the half-life in patients was 20-30 hours, which is likely due to the low affinity (34 nM) of the ddAb for HSA, and other factors.

[1124] This problem is addressed herein by fusing the anti-TNFR1 206 dAb to the Fc domain of IgG1. This was also done to avoid the reactivity of the variable heavy chain (dAb)C-terminus of 206 dAb with pre-existing anti-Vh (variable heavy chain) protein sequences (Rossotti et al. The FEBS Journal 289 (2022) 4304-4327). This resulted in the higher potency of EN-1206-Fc-MV and EN-1206-Fc-BV.

[1125] FIG. 14E summarizes the data shown in FIG. 14 (A, B, C, and D). For suppression of TNF-induced expression of IL8/CXCL8, EN-1206-MV (1 nM) is 9.3 fold more potent than 206dAb, while 1 nM EN-1206-Fc-BV is 7-fold more potent. Similar results are shown for TNF-induced expression of TNF. EN-1206-Fc-MV (1 nM) is 9-fold more potent than dAb206, and 1 nM EN-1206-Fc-BV is 6.5-fold more potent than 206dAb.

[1126] Improved potency occurs at all concentrations of the EN-1206-Fc molecules, although the differences are reduced with higher concentrations of inhibitor. This result could not have been predicted from previous work with these molecules, such as described by Enever et al (Enever et al. Protein Engineering, Design & Selection, 2015, vol. 28 no. 3, pp. 59-66) and Cordy et al (Cordy et al, Clinical and Experimental Immunology, 182: 139-148 (2015). Because higher potency occurs both in the monovalent and bivalent forms of EN-1206-Fc it cannot be the result of multivalency but the because of or resulting from stabilization of a more potent conformation of the variable heavy chain nanobody.

### Additional Results

[1127] Exemplary data in FIGS. 7A and 7B demonstrate that three (3) out of five (5) VhH/VhH-serum albumin candidate molecules suppress the TNF-induced inflammatory cytokine release in vitro. Anti-TNFR1 constructs and combinations of constructs were evaluated for their ability to suppress induction of expression of downstream inflammatory cytokines, CXCL8(IL8) and TNF. The constructs tested included: 1) EN1206, an anti-TNFR1 VhH (206) fusion protein with human serum albumin; 2) EN206 (206), a humanized single domain VHH (nanobody) that binds to domain 4 of TNFR1; 3) 541 (designated elsewhere as 208), a humanized nanobody binding to domain 3 of TNFR1; and 4) 019 a dAB that binds TNFR1.

[1128] 3×10⁵ THP1 cells were treated with En-1206, 206, 541, 019 alone (at 32, 16, 8, and 4 nM concentrations), or with combination treatments: 206+541, 206+019, and 541+019 (at 8 ant 4 nM concentrations), for 30 minutes. After anti-TNFR1 treatment cell were given an TNF-α (50 ng/mL) stimulation for 7 hr. The RNA samples were collected and qPCR analysis was performed to analyze the IL-8 ant TNF-α gene expression using HPRT as an internal control (n=3, mean+SEM).

[1129] The results show that the 206 peptide (EN206) is more potent than the fusion protein, indicating that the HSA portion of the fusion protein can interfere with folding of the VhH domain. The 541(208) peptide showed lower activity than the 206 VhH, indicating that it appears to bind to another epitope on TNFR1. The 019 peptide showed little activity and was not investigated further. Because 208(541) and 206 containing constructs bind to different epitopes on TNFR1, different combinations were tested to identify any synergistic effects. No synergy was observed.

[1130] The 206 and 208 peptides were examined in additional experiments (see Examples above and below) and in other constructs (discussed and provided herein) that contain, as detailed herein, the dAbs linked to Fc's modified for increased half-life and to minimize in vivo Fc effector functions. Exemplary data in FIGS. 15 and 16 demonstrate a dose-dependent inhibition of TNF-α-induced gene expression in the THP1 cells.

[1131] In the first experiment, the ability of monovalent and bivalent constructs of EN-1206-Fc to inhibit TNF-induced cytokine release was compared to Etanercept (Enbrel®), a drug marketed for treating autoinflammatory conditions such as rheumatoid arthritis. 5×10⁵ THP1 cells were treated with 0.05, 0.1, 0.25, 0.5, 1, 3, or nanomolar concentration (nM) of Etanercept, EN-1206-Fc-Bv, or EN-1206-Fc-MV for 30 minutes followed by TNF-α (100 ng/mL) for 6 hours. The RNA samples were collected and qPCR analysis was performed to detect expression levels of IL-8 and TNF-α. HPRT was used as an internal control. FIG. 15 demonstrates the monovalent and bivalent forms of EN-1206-Fc are more potent than etanercept in blocking TNF-induced cytokine release.

[1132] A second experiment was performed to confirm the first, see FIG. 16. THP1 cells (5×10⁵) cells were pre-treated with monovalent (MV) or bivalent (BV) EN-1206-Fc or Etanercept and then stimulated with TNF (100 ng/ml) for 6h. RNA samples were collected, and qPCR analysis of IL-8 and TNF expression was performed, using HPRT as an internal control. Data are expressed as percentage of vehicle treated controls (mean±SEM). The results show that EN206-MV and EN1206-BV are more potent in inhibiting IL-8 and TNF expression than the positive control Etanercept (sold under the trademark Enbrel®). EN-1206-Fc-BV demonstrated 5.9-fold and 15-fold improvements in inhibition of IL-8 and TNF expression, respectively. En-1206-Fc-MV demonstrated a 10.6× and 6.8× fold improvement in inhibition of IL-8 and TNF expression, respectively.

[1133] An advantage of the EN-1206-Fc constructs provided herein is that, Etanercept and other TNF Blockers bind membrane-associated TNF and induce outside to inside signaling, resulting in expression of inflammatory cytokines; this does not occur with the EN-1206-Fc molecules.

### Example 6

### Comparative Data and Additional Description of Differences from the Prior Art

[1134] In these experiments, molecules tested were: 206 (anti-TNFR1 VHH domain only, EN-1000-206, the HSA construct (the 206 dAb linked to human serum albumin), 206 fused with the modified Fc (EN-1206-Fc-MV, monovalent), EN-1206-Fc-BV (bivalent), and EN-1208-BV. Previous work leads those of skill in the field of autoimmune disease to expect that bivalency in anti-TNFR1 antibody constructs leads undesirable to activation of TNFR1 (agonist activity) because of receptor clustering by the antibody construct. It is known that some antibodies are partially agonistic, while others are fully agonistic (see, e.g., Richter et al., PMID 23977237, Richter et al., PMID 30252601, Belka et al., PMID 7720706, Mandik-Nayak et al., doi.org/10.4049/jimmunol.167.4.1920, Yu et al., doi.org/10.1038/s42003-021-02309-5).

[1135] As discussed above, U.S. publication 2014/0112929A1 (Batuwangala et al.) descries and details the agonistic activity of bivalent TNFR1 binding antibody constructs, states that such antibodies are not useful as inhibitors of TNFR1. The published application states: “[a]ccordingly, multivalent agents that bind TNFR1 are generally not effective antagonists of TNFR1 even if they block the binding of TNF-α to TNFR1.” The publication describes monovalent inhibitors of TNFR1, which are derived from a VhH library. Because the conformation of the VhH domain is dependent upon its context of presentation (VhH peptide alone; VhH affinity linked to HSA; VhH fused with human serum albumin (HSA); VhH fused with IgG Fc in either a monovalent or bivalent configuration), it is described and shown herein that the same VhH domain has different interactions with its TNFR1 target.

[1136] As described and shown herein various presentation modalities (VhH alone, VhH fused with HSA, VhH fused with IgG1 Fc in a monovalent and bivalent format) have been explored. Agonism vs. antagonism can be epitope dependent. Some mAbs bind to TNFR1 causing a conformational change in the receptor such that it cannot activate downstream pathways, even in the presence of TNF or lymphotoxin (LT or TNF-P). This mechanism has been reported for the trastuzumab-HER2 receptor tyrosine kinase complex, which mechanism leads to inhibition of signal transduction because of conformational changes that prevent receptors from activating the receptor-associated tyrosine kinase. The TNF receptors belong to the cytokine receptor family and do not have an inherent tyrosine kinase. They, thus, are regulated differently from HER2. As a result, cytokine receptors do not suffer suppression of signaling with monoclonal antibody binding. US application publication 2014/0112929 states that:
[1137] agents that bind TNFR1, such as anti-TNFR1 antibodies, have additionally been shown to induce TNFR1 clustering and signal transduction in the absence of TNF and are commonly used as TNFR1 agonists. (See, e.g., Belka et al., EMBO, 14(6): 1156-1165(1995); Mandik-Nayak et al., J. Immunol, 167:1920-1928(2001). Accordingly, multivalent agents that bind TNFR1 generally are not effective antagonists of TNFR1 even if they block the binding of TNF to TNFR1.

[1138] Thus, according to the prior art anti-TNFR1 constructs are not considered as candidate therapeutic agents for treatment of any of the myriad of diseases, disorders, or conditions in which TNF plays a role in the etiology or in which TNFR1 is a target. In contrast, however, it is shown herein, that contrary to this dogma, TNFR1 constructs that do not have agonist activity can be prepared. The EN1206 constructs, including the 1206 bivalent construct exemplified herein are TNFR1 antagonists, and do not have TNFR1 agonist activity.

[1139] Having shown herein that it is possible to prepare TNFR1 antagonist constructs that do not have TNFR1 agonist activity, other constructs that contain TNFR1 binding moieties, such as dAbs can be prepared by identifying dAbs that bind to the same epitope as that to which the dAb in the 1206 constructs (SEQ ID NO:59) binds, and/or by preparing constructs and, using the assays and methods herein, identifying those that do not have agonist activity. As detailed below, numerous dAbs that bind to the same epitope as the 1206 constructs are identified; constructs containing those dAbs, particularly constructs containing the dAbs linked to the modified Fc's in bivalent and monovalent forms as detailed herein,

[1140] Using the SPR binding format with the extracellular domains of TNFR1 and TNFR2, dose-dependent and high affinity and specificity for TNFR1 was demonstrated; the latter by showing there was no binding to TNFR2. EN-1206-Fc-MV and EN-1206-Fc-BV also were shown to block the binding of TNFR1 ligands (TNF-α and TNF-β/lymphotoxin). EN1206-Fc MV and BV were shown to inhibit TNF-α-induced gene expression in human THP1 cells. These results indicate that EN-1206-Fc-MV and EN-1206-Fc-BV are potent TNFR1 antagonists. In contrast, EN-1208-Fc, on the other hand, despite its ability to block TNF binding to TNFR1, was agonistic and induced TNF-α-mediated activation.

[1141] US publication 2014/0112929 (Batuwangala et al.), discussed above, reports that DOM1H-574-208 (SEQ ID NO:667, containing the 208 dAb) does not compete with TNF-α for binding to TNFR1 (FIG. 24A). This is in contrast to results herein that show that that EN1208-Fc-BV construct competes with TNF-α and with lymphotoxin (TNF-0) for binding to TNFR1 (see, FIG. 12B compare with FIG. 24A). In a TNF-α functional assay, Batuwangala et al. show that the DOM1H-574-208 is capable of inhibiting TNF-α signal transduction and inhibited the TNF-α-induced VCAM-1 upregulation (see, FIG. 24B). These results show that DOM1H-574-208 acts as a TNFR1 antagonist. This should be compared with the results herein that show that in the context of the constructs herein, EN208-Fc-BV BV acts as an agonist (see, FIGS. 13A and 13B and compare with FIG. 24B).

[1142] Batuwangala describes that one immunoglobulin single variable domain, identified in International PCT publication No. WO2011051217 as DOM1 h-574-208 (SEQ ID NO:2 therein and SEQ ID NO:54 herein), was identified as an example of a non-competitive TNFR1-specific binding protein. An example of a competitive TNFR1 binding protein is the heavy chain (Vh) dAb DOM1 h-131-206 (SEQ ID NO:54 herein), identified in WO2008149148.

[1143] Thus, provided herein are constructs that are TNFR1 antagonists, that are not TNFR1 agonists, and also those that do not antagonize TNFR2. They can be prepared from known components, including dAbs and other VhH antibodies, and linked directly or optionally via a linker, to Fc's, modified for improved properties, as described herein, to produce bivalent constructs that do not agonize TNFR1. Other dAbs are identified herein that can be included in constructs in place of the 206 dAb.

### Example 7

### Determination of TNFR1 Epitope Binding for EN1206 and EN1208

### SUMMARY

[1144] An important part of antibody drug discovery and development efforts is finding the target binding specificity and epitope diversity.EN1206 and EN1208 are VHH-Fc fusion proteins that target TNF Receptor Type 1 (TNFR1). The epitope binning results detailed herein demonstrated that EN1206 and EN1208 bind to separate, non-overlapping epitopes on TNFR1. Such differential binding can contribute to the different properties of the EN1206 and EN1208 constructs.

### Materials

[1145] A summary of candidate molecules tested and the Human TNFR1 protein used for binding is shown in the table below. Notably, recombinant TNFR1 used for these experiments was expressed in HEK293 cells to ensure binding is most representative of binding to native human protein.

| | Manufactured | Commercial |
|---|---|---|
| Reference | for Applicant | catalog |
| EN1206-mv | 70269_1W230508 | \ |
| EN1208-bv | 70329_1W230519 | \ |
| Human TNFR1/CD120a | \ | SinoBiologicals: |
| protein, His & Avi tag | | 10872-H27H-B |

### Methods

[1146] An Octet instrument RED96 was used for the assay. Octat anti-penta His biosensor (HIS1K) and Octet Streptavidin (SA) biosensor were used to immobilize the TNFR1-His-avi tag protein. An SA sensor was used for EN1208 binding since EN1208 showed non-specific binding to the HIS1K sensor. Octet RED96 was used to measure the binding affinity of EN1206-mv and EN1208-bv. A dose-dependent binding of EN1206-mv to the immobilized TNFR1 on HIS1K chip was detected within the concentration range of 0.412 nM to 100 nM (FIG. 11A). A dose-dependent binding of EN1208-bv to the immobilized TNFR1 on SA chip was detected within the concentration range of 3.7 nm to 300 nM (FIG. 11B).

[1147] Epitope binning immunoassays using surface plasmon resonance (SPR) was used to determine if EN1206-mv and EN1208-bv bind to the same epitope or non-overlapping epitopes. For the epitope binning assay shown in FIG. 17, the Streptavidin (SA) biosensor chip was used to immobilize the TNFR1. This was followed by binding of the EN1208-bv (the 1st antibody) and EN1206-mv (the 2nd antibody), sequentially, to immobilized TNFR1 on the sensor surface. As can be seen, EN1208-BV and EN1206-MV generated non-overlapping sensor response curves demonstrating binding to non-overlapping epitopes.

### Results and Discussion

[1148] The experiments started with the determination of the binding specificity and affinity of EN1206 and EN1208 to the immobilized human soluble TNFR1. A concentration-dependent binding of EN1206 and EN1208 to the TNFR1 was observed, respectively (Table 15, FIGS. 11A-11B). Due to a lack of detectable dissociation of EN1208-BV after its binding to the immobilized TNFR1 within the dissociation assay time frame (~5 min), the on-rate (ka) and off-rate (kd) could not be calculated. Thus, an affinity (K_{D}) for EN1208 was estimated (Table 15).

TABLE 15
The binding affinity of EN1206 and EN1208 to the immobilized
soluble human TNFR1

| | Sensor chip | ka (1/s*M) | kd (1/s) | KD (M) |
|---|---|---|---|---|
| EN1206-mv | HIS1K | 9.03E+0.5 | 2.84E−04 | 3.14E−10 |
| EN1208-bv | SA | \ | No dissociation in | ~1.0E−12* |
| | | | ~5 min | |

*No dissociation was detected in the assay time frame, so the KD for EN1208 was estimated.

[1149] The results demonstrate that EN1206/Fc-mv and EN1208/Fc-BV bind to the non-overlapping, separate epitopes. Early-stage Ab drug development efforts often generate many leads.

### Example 8

### Suppression of TNF-Induced Cytokine Expression by EN-1206 SUMMARY

[1150] The results herein show that EN-1206 suppress cytokine release almost to baseline by preserving TNFR2 activity. Specific down regulation of TNFR1 by EN-1206-Fc-MV gives a more complete response rate.

### Materials and Methods

[1151] Studies are performed with humanized (HuTNFR1/HuTNF) transgenic mice, n=4-8 per treatment group. Mice were treated with the following: vehicle (PBS, phosphate buffer saline), 10 mg/kg of anti-TNF agent (the antibody sold under the trademark Inflectra® antibody, a generic of anti-TNF antibody Infliximab sold as Remicade®), or 30 mg/kg or 3 mg/kg anti-TNFR1 agent (EN-1206-Fc-MV). Vehicle and treatments were administered via intraperitoneal injection (i.p.) 2 hours prior to administration of 10 μg lipopolysaccharide (LPS) to stimulate TNF-Induced cytokine release. Serum was collected 5 hours following LPS stimulation. See FIG. 20.

### Results and Discussion

[1152] The results demonstrate that EN-1206-Fc-MV at high and low doses inhibits TNF-Induced cytokine release in vivo, see FIG. 21. EN-1206-Fc-MV treatment effected a complete response, whereas 2/8 mice were non-responsive the Infliximab (Inflectra®) treatment groups. Inflectra® antibody is a biosimilar of Infliximab/Remicade® antibody, which is known to leave behind about 20% non-responders. The incomplete response observed in previous anti-TNF agents is due to the co-repression of TNFR2. Commonly used anti-TNF agents, such as, for example adalimumab (sold under the trademark Humira®), etanercept (sold under the trademark Enbrel®) and infliximab (trademark Remicade®) bind to TNF and prevent its binding to TNFR1 and TNFR2. The severe toxicities associated with TNF Blockers are well-documented, and, as described herein, many of these toxicities result from inhibition of TNFR2 function. As demonstrated herein, constructs provided herein do no inhibit TNFR2 function.

### Example 9

Effect of EN-1206BV-Fc, EN-1206MV-Fc, and Entanercept (Enbrel® antibody) on maintaining Treg populations induced by the TNF-α cytokine.

### Summary

[1153] Known anti-TNF agents, such as, for example adalimumab (Humira®), etanercept (Enbrel®) and infliximab (Remicade®), bind to TNF and prevent its binding to TNFR1 and TNFR2. Preventing the binding of TNF and TNFR2 is important for the generation and function of T reg cells (Tseng W et al. Proceedings of the National Academy of Sciences, 2019 116 (43) 21666-21672). The purpose of this experiment was to investigate whether EN-1206-Fc-MV (monovalent) and EN-1206-Fc-BV (bivalent) and their suppression of TNFR1, is superior to Etanercept (TNF Blocker) in preserving the human regulatory T cell population in cultures of human T cells. This example demonstrates that the number of Tregs (CD4⁺CD25⁺FOXP3⁺) and the level of FOXP3 are higher in human immune cells treated with EN-1206-Fc-BV and EN-1206-Fc-MV compared to same dose of the anti-TNF agent Etanercept (sold as Enbrel®).

### Materials and Methods

[1154] Frozen-preserved human T cells were thawed and cultured. CD4⁺ T cells were thawed and maintained in the presence of IL2 (10 ng/ml) for 2 days. In separate cultures, 2×10⁵ CD4⁺ T cells were treated with TNF-α (100 ng/ml) alone or combined with 10 nM of TNF-α Blocker etanercept (Enbrel®) or 10 nM of either TNFR1 inhibitor EN-1206-Fc-BV (bivalent) or EN-1206-Fc-MV (monovalent) in the absence or presence of 1 g/ml anti-CD3 and anti-CD28 monoclonal antibodies (activating reagents to amplify proliferation of T cells) for 24, 48, and 72 hrs. Results, shown in FIGS. 23A-F were obtained (CD25⁺FOXP3⁺ T cells) using FACS analysis (n=3, mean±SEM). FIGS. 23A-23F show the scatter plots and bar graphs generated from a FACS analysis that demonstrate that EN-1206-Fc-MV and EN-1206-Fc-BV are superior to etanercept (Enbrel®; TNF Blocker) in preserving the human regulatory T cell population in cultures of human T cells (CD25⁺FOXP3⁺ T-Cells, n=3, mean SEM). For the bar-graph representation of the FACS data statistical significance is represented as: *<p.05. **<p.01, ***<p.001 for differences between the samples. The solid bar under each ‘*’ indicates the samples being compared.

### Results and Discussion

[1155] Cultures were analyzed by FACS gated for CD25 hi FOXP3⁺(FIG. 23A, 23C, and 23E) without activation (top panels) or with activation (bottom panels). Background levels of staining intensity were lower in the non-activated samples, but in each sample the highest intensity of staining for Treg cells was present in samples treated with TNF+IL2 as shown on the FACS diagram. Median fluorescence intensity for each treatment group at 24, 48, and 72 hrs is depicted in FIGS. 23B, 23D, and 23F. In all instances, human immune cells treated with EN-1206-Fc-BV and EN-1206-Fc-MV resulted in higher levels of Treg cells compared same dose of the anti-TNF agent, etanercept (Enbrel®). These data demonstrate that preferential targeting of TNFR1 (and preservation of TNFR2 function) versus TNF Trapping with etanercept (Enbrel® antibody) sustains the majority of Tregs and results in higher levels of FOXP3, which is a surrogate marker of anti-inflammatory Treg function. This results from higher levels of free TNF as well as lymphotoxin (LT or TNF-0) in the medium, since etanercept (Enbrel®) depletes TNF and LT. Circulating TNF/LT are required for optimal maintenance of Tregs and high levels of FOXP3.

### Example 10

Identification of TNFR1 Binding dAbs

### Summary

[1156] DOM1 h-131-511 (SEQ ID NO: 60) is a V_{H} dAb which binds domain three of human TNFR1 extracellular domain (ECD); EN1206 (DOM1 h-131-206) (SEQ ID NO: 59) is a variant of DOM1 h-131-511 optimized for protease resistance. A multiple sequence alignment (FIG. 19) was performed with each of the polypeptides of SEQ ID Nos: 54-672 to identify which among them bind to the same epitope on TNFR1 as the dAb of SEQ ID NO:59.

### Results and Discussion

[1157] EN1206 (DOM1 h-131-206; SEQ ID NO: 59) binds to the domain 3 of TNFR1 ECD with an affinity of 407 pM measured by SPR. EN1206 (DOM1 h-131-206) is an affinity and stability optimized clone derived from the parental clone DOM1 h-131-511. By contrast, EN1208 (DOM1 h-574-208; SEQ ID NO: 54) binds to the domain 4 of TNFR1 ECD with an affinity of affinity is 270 pM measured by SPR. EN1206 and EN1208 bind to separate, non-overlapping epitopes on TNFR1. While EN1208 shows TNFR1 agonist activity.

[1158] Thirty-six (36) dAbs were identified based on the combined amino acid similarity in the three CDRs (HCDR1, HCDR2, and HCDR3; see FIG. 18) of each sequence to that of DOM1h-131-511 and EN1206 (DOM1 h-131-206). The amino acid sequences of the human CDRs binding domain 3 of TNFR1 ECD are as follows:

HCDR1:
(SEQ ID NO: 1510)
AHETMV
HCDR2:
(SEQ ID NO: 1513)
HIPPDGQDPFYADSVKG
HCDR3:
(SEQ ID NO: 1512)
LPKRGPWFDY

[1159] Any sequences having the CDR identity equal or higher than 95% were identified as binding to the same epitope. The DOM1 h-131-511 (parental)-derived variants can bind to the same epitope with very different affinity, but will not bind to a different epitope if their CDRs are highly identical (>90%). The identified dAbs are those of SEQ ID NOs: 55-84, 86-88, 450, 495-498. Constructs containing each of these dAbs in place of the 206 dAb of SEQ ID NO:59 have TNFR1 antagonistic activity, and lack agonist activity.

[1160] Since modifications will be apparent to those of skill in the art, it is intended that this invention be limited only by the scope of the appended claims.

The application's sequence listing, which the Patent Office published only in electronic form, follows.

SEQUENCE LISTING (1513 sequences)

SEQ ID NO: 1 - protein, 233 aa, Homo sapiens
  REGION 1..233: note = TNF alpha (TNF)
MSTESMIRDVELAEEALPKKTGGPQGSRRCLFLSLFSFLIVAGATTLFCLLHFGVIGPQREEFPRDLSLISPLAQAVRSSSRTPSDKPVAHVVANPQAEGQLQWLNRRANALLANGVELRDNQLVVPSEGLYLIYSQVLFKGQGCPSTHVLLTHTISRIAVSYQTKVNLLSAIKSPCQRETPEGAEAKPWYEPIYLGGVFQLEKGDRLSAEINRPDYLDFAESGQVYFGIIAL

SEQ ID NO: 2 - protein, 157 aa, Homo sapiens [sequence omitted]

SEQ ID NO: 3 - protein, 455 aa, Homo sapiens
  REGION 1..455: note = TNFR1
MGLSTVPDLLLPLVLLELLVGIYPSGVIGLVPHLGDREKRDSVCPQGKYIHPQNNSICCTKCHKGTYLYNDCPGPGQDTDCRECESGSFTASENHLRHCLSCSKCRKEMGQVEISSCTVDRDTVCGCRKNQYRHYWSENLFQCFNCSLCLNGTVHLSCQEKQNTVCTCHAGFFLRENECVSCSNCKKSLECTKLCLPQIENVKGTEDSGTTVLLPLVIFFGLCLLSLLFIGLMYRYQRWKSKLYSIVCGKSTPEKEGELEGTTTKPLAPNPSFSPTPGFTPTLGFSPVPSSTFTSSSTYTPGDCPNFAAPRREVAPPYQGADPILATALASDPIPNPLQKWEDSAHKPQSLDTDDPATLYAVVENVPPLRWKEFVRRLGLSDHEIDRLELQNGRCLREAQYSMLATWRRRTPRREATLELLGRVLRDMDLLGCLEDIEEALCGPAALPPAPSLLR

SEQ ID NO: 4 - protein, 461 aa, Homo sapiens
  REGION 1..461: note = TNFR2
MAPVAVWAALAVGLELWAAAHALPAQVAFTPYAPEPGSTCRLREYYDQTAQMCCSKCSPGQHAKVFCTKTSDTVCDSCEDSTYTQLWNWVPECLSCGSRCSSDQVETQACTREQNRICTCRPGWYCALSKQEGCRLCAPLRKCRPGFGVARPGTETSDVVCKPCAPGTFSNTTSSTDICRPHQICNVVAIPGNASMDAVCTSTSPTRSMAPGAVHLPQPVSTRSQHTQPTPEPSTAPSTSFLLPMGPSPPAEGSTGDFALPVGLIVGVTALGLLIIGVVNCVIMTQVKKKPLCLQREAKVPHLPADKARGTQGPEQQHLLITAPSSSSSSLESSASALDRRAPTRNQPQAPGVEASGAGEARASTGSSDSSPGGHGTQVNVTCIVNVCSSSDHSSQCSSQASSTMGDTDSSPSESPKDEQVPFSKEECAFRSQLETPETLLGSTEEKPLPLGVPDAGMKPS

SEQ ID NO: 5 - protein, 235 aa, Mus musculus
  REGION 1..235: note = Mouse TNF alpha (TNF)
MSTESMIRDVELAEEALPQKMGGFQNSRRCLCLSLFSFLLVAGATTLFCLLNFGVIGPQRDEKFPNGLPLISSMAQTLTLRSSSQNSSDKPVAHVVANHQVEEQLEWLSQRANALLANGMDLKDNQLVVPADGLYLVYSQVLFKGQGCPDYVLLTHTVSRFAISYQEKVNLLSAVKSPCPKDTPEGAELKPWYEPIYLGGVFQLEKGDQLSAEVNLPKYLDFAESGQVYFGVIAL

SEQ ID NO: 6 - protein, 156 aa, Mus musculus
  REGION 1..156: note = Soluble form of mouse TNF alpha (TNF)
LRSSSQNSSDKPVAHVVANHQVEEQLEWLSQRANALLANGMDLKDNQLVVPADGLYLVYSQVLFKGQGCPDYVLLTHTVSRFAISYQEKVNLLSAVKSPCPKDTPEGAELKPWYEPIYLGGVFQLEKGDQLSAEVNLPKYLDFAESGQVYFGVIAL

SEQ ID NO: 7 - protein, 454 aa, Mus musculus
  REGION 1..454: note = Mouse TNFR1
MGLPTVPGLLLSLVLLALLMGIHPSGVTGLVPSLGDREKRDSLCPQGKYVHSKNNSICCTKCHKGTYLVSDCPSPGRDTVCRECEKGTFTASQNYLRQCLSCKTCRKEMSQVEISPCQADKDTVCGCKENQFQRYLSETHFQCVDCSPCFNGTVTIPCKETQNTVCNCHAGFFLRESECVPCSHCKKNEECMKLCLPPPLANVTNPQDSGTAVLLPLVILLGLCLLSFIFISLMCRYPRWRPEVYSIICRDPVPVKEEKAGKPLTPAPSPAFSPTSGFNPTLGFSTPGFSSPVSSTPISPIFGPSNWHFMPPVSEVVPTQGADPLLYESLCSVPAPTSVQKWEDSAHPQRPDNADLAILYAVVDGVPPARWKEFMRFMGLSEHEIERLEMQNGRCLREAQYSMLEAWRRRTPRHEDTLEVVGLVLSKMNLAGCLENILEALRNPAPSSTTRLPR

SEQ ID NO: 8 - protein, 474 aa, Mus musculus
  REGION 1..474: note = Mouse TNFR2
MAPAALWVALVFELQLWATGHTVPAQVVLTPYKPEPGYECQISQEYYDRKAQMCCAKCPPGQYVKHFCNKTSDTVCADCEASMYTQVWNQFRTCLSCSSSCTTDQVEIRACTKQQNRVCACEAGRYCALKTHSGSCRQCMRLSKCGPGFGVASSRAPNGNVLCKACAPGTFSDTTSSTDVCRPHRICSILAIPGNASTDAVCAPESPTLSAIPRTLYVSQPEPTRSQPLDQEPGPSQTPSILTSLGSTPIIEQSTKGGISLPIGLIVGVTSLGLLMLGLVNCIILVQRKKKPSCLQRDAKVPHVPDEKSQDAVGLEQQHLLTTAPSSSSSSLESSASAGDRRAPPGGHPQARVMAEAQGFQEARASSRISDSSHGSHGTHVNVTCIVNVCSSSDHSSQCSSQASATVGDPDAKPSASPKDEQVPFSQEECPSQSPCETTETLQSHEKPLPLGVPDMGMKPSQAGWFDQIAVKVA

SEQ ID NO: 9 - protein, 330 aa, Homo sapiens [sequence omitted]

SEQ ID NO: 10 - protein, 217 aa, Homo sapiens
  REGION 1..217: note = IgG1 Fc (CH2 and CH3 domains)
APELLGGPSVFLFPPKPKDTLMISRTPEVTCVVVDVSHEDPEVKFNWYVDGVEVHNAKTKPREEQYNSTYRVVSVLTVLHQDWLNGKEYKCKVSNKALPAPIEKTISKAKGQPREPQVYTLPPSRDELTKNQVSLTCLVKGFYPSDIAVEWESNGQPENNYKTTPPVLDSDGSFFLYSKLTVDKSRWQQGNVFSCSVMHEALHNHYTQKSLSLSPGK

SEQ ID NO: 11 - protein, 326 aa, Homo sapiens
  REGION 1..326: note = Human IgG2 Heavy chain constant domain
  DOMAIN 1..98: note = CH1
  DOMAIN 99..110: note = hinge region
  DOMAIN 111..219: note = CH2
  DOMAIN 220..326: note = CH3
ASTKGPSVFPLAPCSRSTSESTAALGCLVKDYFPEPVTVSWNSGALTSGVHTFPAVLQSSGLYSLSSVVTVPSSNFGTQTYTCNVDHKPSNTKVDKTVERKCCVECPPCPAPPVAGPSVFLFPPKPKDTLMISRTPEVTCVVVDVSHEDPEVQFNWYVDGVEVHNAKTKPREEQFNSTFRVVSVLTVVHQDWLNGKEYKCKVSNKGLPAPIEKTISKTKGQPREPQVYTLPPSREEMTKNQVSLTCLVKGFYPSDIAVEWESNGQPENNYKTTPPMLDSDGSFFLYSKLTVDKSRWQQGNVFSCSVMHEALHNHYTQKSLSLSPGK

SEQ ID NO: 12 - protein, 216 aa, Homo sapiens
  REGION 1..216: note = IgG2 Fc (CH2 and CH3 domains)
APPVAGPSVFLFPPKPKDTLMISRTPEVTCVVVDVSHEDPEVQFNWYVDGVEVHNAKTKPREEQFNSTFRVVSVLTVVHQDWLNGKEYKCKVSNKGLPAPIEKTISKTKGQPREPQVYTLPPSREEMTKNQVSLTCLVKGFYPSDIAVEWESNGQPENNYKTTPPMLDSDGSFFLYSKLTVDKSRWQQGNVFSCSVMHEALHNHYTQKSLSLSPGK

SEQ ID NO: 13 - protein, 377 aa, Homo sapiens
  REGION 1..377: note = IgG3 heavy chain constant domain
  DOMAIN 1..98: note = CH1
  DOMAIN 99..160: note = Hinge region
  DOMAIN 161..270: note = CH2
  DOMAIN 271..377: note = CH3
ASTKGPSVFPLAPCSRSTSGGTAALGCLVKDYFPEPVTVSWNSGALTSGVHTFPAVLQSSGLYSLSSVVTVPSSSLGTQTYTCNVNHKPSNTKVDKRVELKTPLGDTTHTCPRCPEPKSCDTPPPCPRCPEPKSCDTPPPCPRCPEPKSCDTPPPCPRCPAPELLGGPSVFLFPPKPKDTLMISRTPEVTCVVVDVSHEDPEVQFKWYVDGVEVHNAKTKPREEQYNSTFRVVSVLTVLHQDWLNGKEYKCKVSNKALPAPIEKTISKTKGQPREPQVYTLPPSREEMTKNQVSLTCLVKGFYPSDIAVEWESSGQPENNYNTTPPMLDSDGSFFLYSKLTVDKSRWQQGNIFSCSVMHEALHNRFTQKSLSLSPGK

SEQ ID NO: 14 - protein, 217 aa, Homo sapiens
  REGION 1..217: note = IgG3 Fc (CH2 and CH3 domains)
APELLGGPSVFLFPPKPKDTLMISRTPEVTCVVVDVSHEDPEVQFKWYVDGVEVHNAKTKPREEQYNSTFRVVSVLTVLHQDWLNGKEYKCKVSNKALPAPIEKTISKTKGQPREPQVYTLPPSREEMTKNQVSLTCLVKGFYPSDIAVEWESSGQPENNYNTTPPMLDSDGSFFLYSKLTVDKSRWQQGNIFSCSVMHEALHNRFTQKSLSLSPGK

SEQ ID NO: 15 - protein, 327 aa, Homo sapiens
  REGION 1..327: note = IgG4 Heavy chain constant domain
  DOMAIN 1..98: note = CH1
  DOMAIN 99..110: note = Hinge region
  DOMAIN 111..220: note = CH2
  DOMAIN 221..327: note = CH3
ASTKGPSVFPLAPCSRSTSESTAALGCLVKDYFPEPVTVSWNSGALTSGVHTFPAVLQSSGLYSLSSVVTVPSSSLGTKTYTCNVDHKPSNTKVDKRVESKYGPPCPSCPAPEFLGGPSVFLFPPKPKDTLMISRTPEVTCVVVDVSQEDPEVQFNWYVDGVEVHNAKTKPREEQFNSTYRVVSVLTVLHQDWLNGKEYKCKVSNKGLPSSIEKTISKAKGQPREPQVYTLPPSQEEMTKNQVSLTCLVKGFYPSDIAVEWESNGQPENNYKTTPPVLDSDGSFFLYSRLTVDKSRWQEGNVFSCSVMHEALHNHYTQKSLSLSLGK

SEQ ID NO: 16 - protein, 217 aa, Homo sapiens
  REGION 1..217: note = IgG4 Fc (CH2 and CH3 domains)
APEFLGGPSVFLFPPKPKDTLMISRTPEVTCVVVDVSQEDPEVQFNWYVDGVEVHNAKTKPREEQFNSTYRVVSVLTVLHQDWLNGKEYKCKVSNKGLPSSIEKTISKAKGQPREPQVYTLPPSQEEMTKNQVSLTCLVKGFYPSDIAVEWESNGQPENNYKTTPPVLDSDGSFFLYSRLTVDKSRWQEGNVFSCSVMHEALHNHYTQKSLSLSLGK

SEQ ID NO: 17 - protein, 107 aa, Homo sapiens [sequence omitted]

SEQ ID NO: 18 - protein, 106 aa, Homo sapiens
  REGION 1..106: note = Immunoglobulin lambda constant 1 light chain domain (chain C)
GQPKANPTVTLFPPSSEELQANKATLVCLISDFYPGAVTVAWKADGSPVKAGVETTKPSKQSNNKYAASSYLSLTPEQWKSHRSYSCQVTHEGSTVEKTVAPTECS

SEQ ID NO: 19 - protein, 106 aa, Homo sapiens
  REGION 1..106: note = Immunoglobulin lambda CONSTANT 2 light chain domain (chain C)
GQPKAAPSVTLFPPSSEELQANKATLVCLISDFYPGAVTVAWKADSSPVKAGVETTTPSKQSNNKYAASSYLSLTPEQWKSHRSYSCQVTHEGSTVEKTVAPTECS

SEQ ID NO: 20 - protein, 106 aa, Homo sapiens
  REGION 1..106: note = Immunoglobulin lambda CONSTANT 3 light chain domain (chain C)
GQPKAAPSVTLFPPSSEELQANKATLVCLISDFYPGAVTVAWKADSSPVKAGVETTTPSKQSNNKYAASSYLSLTPEQWKSHKSYSCQVTHEGSTVEKTVAPTECS

SEQ ID NO: 21 - protein, 106 aa, Homo sapiens
  REGION 1..106: note = Immunoglobulin lambda CONSTANT 6 light chain domain (chain C)
GQPKAAPSVTLFPPSSEELQANKATLVCLISDFYPGAVKVAWKADGSPVNTGVETTTPSKQSNNKYAASSYLSLTPEQWKSHRSYSCQVTHEGSTVEKTVAPAECS

SEQ ID NO: 22 - protein, 106 aa, Homo sapiens
  REGION 1..106: note = Immunoglobulin lambda CONSTANT 7 light chain domain (chain C)
GQPKAAPSVTLFPPSSEELQANKATLVCLVSDFNPGAVTVAWKADGSPVKVGVETTKPSKQSNNKYAASSYLSLTPEQWKSHRSYSCRVTHEGSTVEKTVAPAECS

SEQ ID NO: 23 - protein, 214 aa, synthetic construct
  REGION 1..214: note = Adalimumab Light Chain
DIQMTQSPSSLSASVGDRVTITCRASQGIRNYLAWYQQKPGKAPKLLIYAASTLQSGVPSRFSGSGSGTDFTLTISSLQPEDVATYYCQRYNRAPYTFGQGTKVEIKRTVAAPSVFIFPPSDEQLKSGTASVVCLLNNFYPREAKVQWKVDNALQSGNSQESVTEQDSKDSTYSLSSTLTLSKADYEKHKVYACEVTHQGLSSPVTKSFNRGEC

SEQ ID NO: 24 - protein, 451 aa, synthetic construct
  REGION 1..451: note = Adalimumab Heavy Chain
EVQLVESGGGLVQPGRSLRLSCAASGFTFDDYAMHWVRQAPGKGLEWVSAITWNSGHIDYADSVEGRFTISRDNAKNSLYLQMNSLRAEDTAVYYCAKVSYLSTASSLDYWGQGTLVTVSSASTKGPSVFPLAPSSKSTSGGTAALGCLVKDYFPEPVTVSWNSGALTSGVHTFPAVLQSSGLYSLSSVVTVPSSSLGTQTYICNVNHKPSNTKVDKKVEPKSCDKTHTCPPCPAPELLGGPSVFLFPPKPKDTLMISRTPEVTCVVVDVSHEDPEVKFNWYVDGVEVHNAKTKPREEQYNSTYRVVSVLTVLHQDWLNGKEYKCKVSNKALPAPIEKTISKAKGQPREPQVYTLPPSRDELTKNQVSLTCLVKGFYPSDIAVEWESNGQPENNYKTTPPVLDSDGSFFLYSKLTVDKSRWQQGNVFSCSVMHEALHNHYTQKSLSLSPGK

SEQ ID NO: 25 - protein, 214 aa, synthetic construct
  REGION 1..214: note = Trastuzumab light chain
DIQMTQSPSSLSASVGDRVTITCRASQDVNTAVAWYQQKPGKAPKLLIYSASFLYSGVPSRFSGSRSGTDFTLTISSLQPEDFATYYCQQHYTTPPTFGQGTKVEIKRTVAAPSVFIFPPSDEQLKSGTASVVCLLNNFYPREAKVQWKVDNALQSGNSQESVTEQDSKDSTYSLSSTLTLSKADYEKHKVYACEVTHQGLSSPVTKSFNRGEC

SEQ ID NO: 26 - protein, 450 aa, synthetic construct
  REGION 1..450: note = Trastuzumab heavy chain
  DOMAIN 1..120: note = VH
  DOMAIN 121..218: note = CH1
  DOMAIN 219..233: note = hinge region
  DOMAIN 234..343: note = CH2
  DOMAIN 344..450: note = CH3
EVQLVESGGGLVQPGGSLRLSCAASGFNIKDTYIHWVRQAPGKGLEWVARIYPTNGYTRYADSVKGRFTISADTSKNTAYLQMNSLRAEDTAVYYCSRWGGDGFYAMDYWGQGTLVTVSSASTKGPSVFPLAPSSKSTSGGTAALGCLVKDYFPEPVTVSWNSGALTSGVHTFPAVLQSSGLYSLSSVVTVPSSSLGTQTYICNVNHKPSNTKVDKKVEPKSCDKTHTCPPCPAPELLGGPSVFLFPPKPKDTLMISRTPEVTCVVVDVSHEDPEVKFNWYVDGVEVHNAKTKPREEQYNSTYRVVSVLTVLHQDWLNGKEYKCKVSNKALPAPIEKTISKAKGQPREPQVYTLPPSREEMTKNQVSLTCLVKGFYPSDIAVEWESNGQPENNYKTTPPVLDSDGSFFLYSKLTVDKSRWQQGNVFSCSVMHEALHNHYTQKSLSLSPGK

SEQ ID NO: 27 - protein, 217 aa, synthetic construct
  REGION 1..217: note = Trastuzumab Fc (CH2 and CH3 domains)
APELLGGPSVFLFPPKPKDTLMISRTPEVTCVVVDVSHEDPEVKFNWYVDGVEVHNAKTKPREEQYNSTYRVVSVLTVLHQDWLNGKEYKCKVSNKALPAPIEKTISKAKGQPREPQVYTLPPSREEMTKNQVSLTCLVKGFYPSDIAVEWESNGQPENNYKTTPPVLDSDGSFFLYSKLTVDKSRWQQGNVFSCSVMHEALHNHYTQKSLSLSPGK

SEQ ID NO: 28 - protein, 214 aa, synthetic construct
  REGION 1..214: note = Nivolumab light chain
EIVLTQSPATLSLSPGERATLSCRASQSVSSYLAWYQQKPGQAPRLLIYDASNRATGIPARFSGSGSGTDFTLTISSLEPEDFAVYYCQQSSNWPRTFGQGTKVEIKRTVAAPSVFIFPPSDEQLKSGTASVVCLLNNFYPREAKVQWKVDNALQSGNSQESVTEQDSKDSTYSLSSTLTLSKADYEKHKVYACEVTHQGLSSPVTKSFNRGEC

SEQ ID NO: 29 - protein, 440 aa, synthetic construct
  REGION 1..440: note = Nivolumab heavy chain
  DOMAIN 1..113: note = VH
  DOMAIN 114..221: note = CH1
  DOMAIN 212..223: note = Hinge region
  DOMAIN 224..333: note = CH2
  DOMAIN 334..440: note = CH3
QVQLVESGGGVVQPGRSLRLDCKASGITFSNSGMHWVRQAPGKGLEWVAVIWYDGSKRYYADSVKGRFTISRDNSKNTLFLQMNSLRAEDTAVYYCATNDDYWGQGTLVTVSSASTKGPSVFPLAPCSRSTSESTAALGCLVKDYFPEPVTVSWNSGALTSGVHTFPAVLQSSGLYSLSSVVTVPSSSLGTKTYTCNVDHKPSNTKVDKRVESKYGPPCPPCPAPEFLGGPSVFLFPPKPKDTLMISRTPEVTCVVVDVSQEDPEVQFNWYVDGVEVHNAKTKPREEQFNSTYRVVSVLTVLHQDWLNGKEYKCKVSNKGLPSSIEKTISKAKGQPREPQVYTLPPSQEEMTKNQVSLTCLVKGFYPSDIAVEWESNGQPENNYKTTPPVLDSDGSFFLYSRLTVDKSRWQEGNVFSCSVMHEALHNHYTQKSLSLSLGK

SEQ ID NO: 30 - protein, 217 aa, synthetic construct; identical to SEQ ID NO: 16
  REGION 1..217: note = Nivolumab Fc (CH2 and CH3 domains)

SEQ ID NO: 31 - protein, 444 aa, synthetic construct
  REGION 1..444: note = ATROSAB heavy chain
  DOMAIN 1..115: note = VH
  DOMAIN 116..218: note = CH1
  DOMAIN 219..234: note = Hinge region
  DOMAIN 235..337: note = CH2
  DOMAIN 338..444: note = CH3
QVQLVQSGAEVKKPGSSVKVSCKASGYTFTDFYINWVRQAPGQGLEWIGEIYPYSGHAYYNEKFKARVTITADKSTSTAYMELSSLRSEDTAVYYCARWDFLDYWGQGTTVTVSSASTKGPSVFPLAPSSKSTSGGTAALGCLVKDYFPEPVTVSWNSGALTSGVHTFPAVLQSSGLYSLSSVVTVPSSSLGTQTYICNVNHKPSNTKVDKKVEPKSCDKTHTCPPCPAPPVAGPSVFLFPPKPKDTLMISRTPEVTCVVVDVSHEDPEVKFNWYVDGVEVHNAKTKPREEQYNSTYRVVSVLTVLHQDWLNGKEYKCKVSNKGLPSSIEKTISKAKGQPREPQVYTLPPSRDELTKNQVSLTCLVKGFYPSDIAVEWESNGQPENNYKTTPPVLDSDGSFFLYSKLTVDKSRWQQGNVFSCSVMHEALHNHYTQKSLSLSPGK

SEQ ID NO: 32 - protein, 219 aa, synthetic construct
  REGION 1..219: note = ATROSAB light chain
  DOMAIN 1..113: note = VL
  DOMAIN 114..219: note = CL
DIVMTQSPLSLPVTPGEPASISCRSSQSLLHSNGNTYLHWYLQKPGQSPQLLIYTVSNRFSGVPDRFSGSGSGTDFTLKISRVEAEDVGVYYCSQSTHVPYTFGGGTKVEIKRTVAAPSVFIFPPSDEQLKSGTASVVCLLNNFYPREAKVQWKVDNALQSGNSQESVTEQDSKDSTYSLSSTLTLSKADYEKHKVYACEVTHQGLSSPVTKSFNRGEC

SEQ ID NO: 33 - protein, 115 aa, synthetic construct
  REGION 1..115: note = H398 VH domain
QVQLQESGAELARPGASVKLSCKASGYTFTDFYINWVKQRTGQGLEWIGEIYPYSGHAYYNEKFKAKATLTADKSSSTAFMQLNSLTSEDSAVYFCVRWDFLDYWGQGTTLTVSS

SEQ ID NO: 34 - protein, 113 aa, synthetic construct
  REGION 1..113: note = H398 VL domain
DIVMTQSPLSLPVSLGDQASISCRSSQSLLHSNGNTYLHWYVQKPGQSPKLLIYTVSNRFSGVPDRFSGSGSGTDFTLKISRVEAEDLGVYFCSQSTHVPYTFGGGTKLEIKR

SEQ ID NO: 35 - protein, 609 aa, Homo sapiens [sequence omitted]

SEQ ID NO: 36 - protein, 365 aa, Homo sapiens
  REGION 1..365: note = Human FcRn (IgG receptor FcRn large subunit p51)
  SIGNAL 1..23: note = signal peptide
  DOMAIN 24..297: note = extracellular domain
  DOMAIN 298..321: note = transmembrane domain
  DOMAIN 322..365: note = cytoplasmic domain
MGVPRPQPWALGLLLFLLPGSLGAESHLSLLYHLTAVSSPAPGTPAFWVSGWLGPQQYLSYNSLRGEAEPCGAWVWENQVSWYWEKETTDLRIKEKLFLEAFKALGGKGPYTLQGLLGCELGPDNTSVPTAKFALNGEEFMNFDLKQGTWGGDWPEALAISQRWQQQDKAANKELTFLLFSCPHRLREHLERGRGNLEWKEPPSMRLKARPSSPGFSVLTCSAFSFYPPELQLRFLRNGLAAGTGQGDFGPNSDGSFHASSSLTVKSGDEHHYCCIVQHAGLAQPLRVELESPAKSSVLVVGIVIGVLLLTAAAVGGALLWRRMRSGLPAPWISLRGDDTGVLLPTPGEAQDADLKDVNVIPATA

SEQ ID NO: 37 - DNA, 690 bp, synthetic construct
  misc_feature 1..690: note = DMS5541
  source 1..690: mol_type = other DNA
gaggtgcagctgttggagtctgggggaggcttggtacagcctggggggtccctgcgtctctcctgtgcagcctccggattcacctttgataagtattcgatggggtgggtccgccaggctccagggaagggtctagagtgggtctcacagatttcggatactgctgatcgtacatactacgcacacgcggtgaagggccggttcaccatctcccgcgacaattccaagaacacgctgtatctgcaaatgaacagcctgcgtgctgaggacaccgcggtatattactgtgcgatatatactgggcgttgggtgccttttgagtactggggtcagggaaccctggtcaccgtctcgagcgctagcaccgacatccagatgacccagtctccatcctccctgtctgcatctgtaggagaccgtgtcaccatcacttgccgggcaagtcgtccgattgggacgacgttaagttggtaccagcagaaaccagggaaagcccctaagctcctgatcctgtggaattcccgtttgcaaagtggggtcccatcacgtttcagtggcagtggatctgggacagatttcactctcaccatcagcagtctgcaacctgaagattttgctacgtactactgtgcgcaggctgggacgcatcctacgacgttcggccaagggaccaaggtggaaatcaaacgg

SEQ ID NO: 38 - protein, 230 aa, synthetic construct
  REGION 1..230: note = DMS5541
EVQLLESGGGLVQPGGSLRLSCAASGFTFDKYSMGWVRQAPGKGLEWVSQISDTADRTYYAHAVKGRFTISRDNSKNTLYLQMNSLRAEDTAVYYCAIYTGRWVPFEYWGQGTLVTVSSASTDIQMTQSPSSLSASVGDRVTITCRASRPIGTTLSWYQQKPGKAPKLLILWNSRLQSGVPSRFSGSGSGTDFTLTISSLQPEDFATYYCAQAGTHPTTFGQGTKVEIKR

SEQ ID NO: 39 - protein, 231 aa, synthetic construct
  REGION 1..231: note = DMS5540 (mouse specific)
EVQLLESGGGLVQPGGSLRLSCAASGFTFNRYSMGWLRQAPGKGLEWVSRIDSYGRGTYYEDPVKGRFSISRDNSKNTLYLQMNSLRAEDTAVYYCAKISQFGSNAFDYWGQGTQVTVSSASTDIQMTQSPSSLSASVGDRVTITCRASRPIGTMLSWYQQKPGKAPKLLILFGSRLQSGVPSRFSGSGSGTDFTLTISSLQPEDFATYYCAQAGTHPTTFGQGTKVEIKR

SEQ ID NO: 40 - protein, 1210 aa, Homo sapiens [sequence omitted]

SEQ ID NO: 41 - protein, 1186 aa, Homo sapiens
  REGION 1..1186: note = Mature human EGFR/HER1 (minus the signal peptide)
  DOMAIN 1..621: note = Extracellular domain (ECD)
  DOMAIN 1..165: note = domain I of ECD
  DOMAIN 166..313: note = domain II of ECD
  DOMAIN 314..481: note = domain III of ECD
  DOMAIN 482..621: note = domain IV of ECD
LEEKKVCQGTSNKLTQLGTFEDHFLSLQRMFNNCEVVLGNLEITYVQRNYDLSFLKTIQEVAGYVLIALNTVERIPLENLQIIRGNMYYENSYALAVLSNYDANKTGLKELPMRNLQEILHGAVRFSNNPALCNVESIQWRDIVSSDFLSNMSMDFQNHLGSCQKCDPSCPNGSCWGAGEENCQKLTKIICAQQCSGRCRGKSPSDCCHNQCAAGCTGPRESDCLVCRKFRDEATCKDTCPPLMLYNPTTYQMDVNPEGKYSFGATCVKKCPRNYVVTDHGSCVRACGADSYEMEEDGVRKCKKCEGPCRKVCNGIGIGEFKDSLSINATNIKHFKNCTSISGDLHILPVAFRGDSFTHTPPLDPQELDILKTVKEITGFLLIQAWPENRTDLHAFENLEIIRGRTKQHGQFSLAVVSLNITSLGLRSLKEISDGDVIISGNKNLCYANTINWKKLFGTSGQKTKIISNRGENSCKATGQVCHALCSPEGCWGPEPRDCVSCRNVSRGRECVDKCNLLEGEPREFVENSECIQCHPECLPQAMNITCTGRGPDNCIQCAHYIDGPHCVKTCPAGVMGENNTLVWKYADAGHVCHLCHPNCTYGCTGPGLEGCPTNGPKIPSIATGMVGALLLLLVVALGIGLFMRRRHIVRKRTLRRLLQERELVEPLTPSGEAPNQALLRILKETEFKKIKVLGSGAFGTVYKGLWIPEGEKVKIPVAIKELREATSPKANKEILDEAYVMASVDNPHVCRLLGICLTSTVQLITQLMPFGCLLDYVREHKDNIGSQYLLNWCVQIAKGMNYLEDRRLVHRDLAARNVLVKTPQHVKITDFGLAKLLGAEEKEYHAEGGKVPIKWMALESILHRIYTHQSDVWSYGVTVWELMTFGSKPYDGIPASEISSILEKGERLPQPPICTIDVYMIMVKCWMIDADSRPKFRELIIEFSKMARDPQRYLVIQGDERMHLPSPTDSNFYRALMDEEDMDDVVDADEYLIPQQGFFSSPSTSRTPLLSSLSATSNNSTVACIDRNGLQSCPIKEDSFLQRYSSDPTGALTEDSIDDTFLPVPEYINQSVPKRPAGSVQNPVYHNQPLNPAPSRDPHYQDPHSTAVGNPEYLNTVQPTCVNSTFDSPAHWAQKGSHQISLDNPDYQQDFFPKEAKPNGIFKGSTAENAEYLRVAPQSSEFIGA

SEQ ID NO: 42 - protein, 1255 aa, Homo sapiens [sequence omitted]

SEQ ID NO: 43 - protein, 1233 aa, Homo sapiens
  REGION 1..1233: note = Mature human HER2 (ErbB2) Protein (minus the signal peptide)
  DOMAIN 1..628: note = Extracellular domain (ECD)
  DOMAIN 1..172: note = domain I of ECD
  DOMAIN 173..319: note = domain II of ECD
  DOMAIN 320..488: note = domain III of ECD
  DOMAIN 489..628: note = domain IV of ECD
TQVCTGTDMKLRLPASPETHLDMLRHLYQGCQVVQGNLELTYLPTNASLSFLQDIQEVQGYVLIAHNQVRQVPLQRLRIVRGTQLFEDNYALAVLDNGDPLNNTTPVTGASPGGLRELQLRSLTEILKGGVLIQRNPQLCYQDTILWKDIFHKNNQLALTLIDTNRSRACHPCSPMCKGSRCWGESSEDCQSLTRTVCAGGCARCKGPLPTDCCHEQCAAGCTGPKHSDCLACLHFNHSGICELHCPALVTYNTDTFESMPNPEGRYTFGASCVTACPYNYLSTDVGSCTLVCPLHNQEVTAEDGTQRCEKCSKPCARVCYGLGMEHLREVRAVTSANIQEFAGCKKIFGSLAFLPESFDGDPASNTAPLQPEQLQVFETLEEITGYLYISAWPDSLPDLSVFQNLQVIRGRILHNGAYSLTLQGLGISWLGLRSLRELGSGLALIHHNTHLCFVHTVPWDQLFRNPHQALLHTANRPEDECVGEGLACHQLCARGHCWGPGPTQCVNCSQFLRGQECVEECRVLQGLPREYVNARHCLPCHPECQPQNGSVTCFGPEADQCVACAHYKDPPFCVARCPSGVKPDLSYMPIWKFPDEEGACQPCPINCTHSCVDLDDKGCPAEQRASPLTSIISAVVGILLVVVLGVVFGILIKRRQQKIRKYTMRRLLQETELVEPLTPSGAMPNQAQMRILKETELRKVKVLGSGAFGTVYKGIWIPDGENVKIPVAIKVLRENTSPKANKEILDEAYVMAGVGSPYVSRLLGICLTSTVQLVTQLMPYGCLLDHVRENRGRLGSQDLLNWCMQIAKGMSYLEDVRLVHRDLAARNVLVKSPNHVKITDFGLARLLDIDETEYHADGGKVPIKWMALESILRRRFTHQSDVWSYGVTVWELMTFGAKPYDGIPAREIPDLLEKGERLPQPPICTIDVYMIMVKCWMIDSECRPRFRELVSEFSRMARDPQRFVVIQNEDLGPASPLDSTFYRSLLEDDDMGDLVDAEEYLVPQQGFFCPDPAPGAGGMVHHRHRSSSTRSGGGDLTLGLEPSEEEAPRSPLAPSEGAGSDVFDGDLGMGAAKGLQSLPTHDPSPLQRYSEDPTVPLPSETDGYVAPLTCSPQPEYVNQPDVRPQPPSPREGPLPAARPAGATLERPKTLSPGKNGVVKDVFAFGGAVENPEYLTPQGGAAPQPHPPPAFSPAFDNLYYWDQDPPERGAPPSTFKGTPTAENPEYLGLDVPV

SEQ ID NO: 44 - protein, 1342 aa, Homo sapiens
  REGION 1..1342: note = Human HER3 (ErbB3) precursor
  SIGNAL 1..19: note = signal peptide
  DOMAIN 20..643: note = Extracellular domain (ECD)
  DOMAIN 644..664: note = transmembrane region
  DOMAIN 665..1342: note = cytoplasmic domain
  DOMAIN 709..966: note = protein kinase
MRANDALQVLGLLFSLARGSEVGNSQAVCPGTLNGLSVTGDAENQYQTLYKLYERCEVVMGNLEIVLTGHNADLSFLQWIREVTGYVLVAMNEFSTLPLPNLRVVRGTQVYDGKFAIFVMLNYNTNSSHALRQLRLTQLTEILSGGVYIEKNDKLCHMDTIDWRDIVRDRDAEIVVKDNGRSCPPCHEVCKGRCWGPGSEDCQTLTKTICAPQCNGHCFGPNPNQCCHDECAGGCSGPQDTDCFACRHFNDSGACVPRCPQPLVYNKLTFQLEPNPHTKYQYGGVCVASCPHNFVVDQTSCVRACPPDKMEVDKNGLKMCEPCGGLCPKACEGTGSGSRFQTVDSSNIDGFVNCTKILGNLDFLITGLNGDPWHKIPALDPEKLNVFRTVREITGYLNIQSWPPHMHNFSVFSNLTTIGGRSLYNRGFSLLIMKNLNVTSLGFRSLKEISAGRIYISANRQLCYHHSLNWTKVLRGPTEERLDIKHNRPRRDCVAEGKVCDPLCSSGGCWGPGPGQCLSCRNYSRGGVCVTHCNFLNGEPREFAHEAECFSCHPECQPMEGTATCNGSGSDTCAQCAHFRDGPHCVSSCPHGVLGAKGPIYKYPDVQNECRPCHENCTQGCKGPELQDCLGQTLVLIGKTHLTMALTVIAGLVVIFMMLGGTFLYWRGRRIQNKRAMRRYLERGESIEPLDPSEKANKVLARIFKETELRKLKVLGSGVFGTVHKGVWIPEGESIKIPVCIKVIEDKSGRQSFQAVTDHMLAIGSLDHAHIVRLLGLCPGSSLQLVTQYLPLGSLLDHVRQHRGALGPQLLLNWGVQIAKGMYYLEEHGMVHRNLAARNVLLKSPSQVQVADFGVADLLPPDDKQLLYSEAKTPIKWMALESIHFGKYTHQSDVWSYGVTVWELMTFGAEPYAGLRLAEVPDLLEKGERLAQPQICTIDVYMVMVKCWMIDENIRPTFKELANEFTRMARDPPRYLVIKRESGPGIAPGPEPHGLTNKKLEEVELEPELDLDLDLEAEEDNLATTTLGSALSLPVGTLNRPRGSQSLLSPSSGYMPMNQGNLGESCQESAVSGSSERCPRPVSLHPMPRGCLASESSEGHVTGSEAELQEKVSMCRSRSRSRSPRPRGDSAYHSQRHSLLTPVTPLSPPGLEEEDVNGYVMPDTHLKGTPSSREGTLSSVGLSSVLGTEEEDEDEEYEYMNRRRRHSPPHPPRPSSLEELGYEYMDVGSDLSASLGSTQSCPLHPVPIMPTAGTTPDEDYEYMNRQRDGGGPGGDYAAMGACPASEQGYEEMRAFQGPGHQAPHVHYARLKTLRSLEATDSAFDNPDYWHSRLFPKANAQRT

SEQ ID NO: 45 - protein, 1323 aa, Homo sapiens
  REGION 1..1323: note = Mature human HER3 (ErbB3) protein (minus the signal peptide)
  DOMAIN 1..621: note = Extracellular domain (ECD)
  DOMAIN 1..166: note = domain I of ECD
  DOMAIN 167..311: note = domain II of ECD
  DOMAIN 312..480: note = domain III of ECD
  DOMAIN 481..621: note = domain IV of ECD
SEVGNSQAVCPGTLNGLSVTGDAENQYQTLYKLYERCEVVMGNLEIVLTGHNADLSFLQWIREVTGYVLVAMNEFSTLPLPNLRVVRGTQVYDGKFAIFVMLNYNTNSSHALRQLRLTQLTEILSGGVYIEKNDKLCHMDTIDWRDIVRDRDAEIVVKDNGRSCPPCHEVCKGRCWGPGSEDCQTLTKTICAPQCNGHCFGPNPNQCCHDECAGGCSGPQDTDCFACRHFNDSGACVPRCPQPLVYNKLTFQLEPNPHTKYQYGGVCVASCPHNFVVDQTSCVRACPPDKMEVDKNGLKMCEPCGGLCPKACEGTGSGSRFQTVDSSNIDGFVNCTKILGNLDFLITGLNGDPWHKIPALDPEKLNVFRTVREITGYLNIQSWPPHMHNFSVFSNLTTIGGRSLYNRGFSLLIMKNLNVTSLGFRSLKEISAGRIYISANRQLCYHHSLNWTKVLRGPTEERLDIKHNRPRRDCVAEGKVCDPLCSSGGCWGPGPGQCLSCRNYSRGGVCVTHCNFLNGEPREFAHEAECFSCHPECQPMEGTATCNGSGSDTCAQCAHFRDGPHCVSSCPHGVLGAKGPIYKYPDVQNECRPCHENCTQGCKGPELQDCLGQTLVLIGKTHLTMALTVIAGLVVIFMMLGGTFLYWRGRRIQNKRAMRRYLERGESIEPLDPSEKANKVLARIFKETELRKLKVLGSGVFGTVHKGVWIPEGESIKIPVCIKVIEDKSGRQSFQAVTDHMLAIGSLDHAHIVRLLGLCPGSSLQLVTQYLPLGSLLDHVRQHRGALGPQLLLNWGVQIAKGMYYLEEHGMVHRNLAARNVLLKSPSQVQVADFGVADLLPPDDKQLLYSEAKTPIKWMALESIHFGKYTHQSDVWSYGVTVWELMTFGAEPYAGLRLAEVPDLLEKGERLAQPQICTIDVYMVMVKCWMIDENIRPTFKELANEFTRMARDPPRYLVIKRESGPGIAPGPEPHGLTNKKLEEVELEPELDLDLDLEAEEDNLATTTLGSALSLPVGTLNRPRGSQSLLSPSSGYMPMNQGNLGESCQESAVSGSSERCPRPVSLHPMPRGCLASESSEGHVTGSEAELQEKVSMCRSRSRSRSPRPRGDSAYHSQRHSLLTPVTPLSPPGLEEEDVNGYVMPDTHLKGTPSSREGTLSSVGLSSVLGTEEEDEDEEYEYMNRRRRHSPPHPPRPSSLEELGYEYMDVGSDLSASLGSTQSCPLHPVPIMPTAGTTPDEDYEYMNRQRDGGGPGGDYAAMGACPASEQGYEEMRAFQGPGHQAPHVHYARLKTLRSLEATDSAFDNPDYWHSRLFPKANAQRT

SEQ ID NO: 46 - protein, 1308 aa, Homo sapiens
  REGION 1..1308: note = Human HER4 (ErbB4) precursor
  SIGNAL 1..25: note = signal peptide
  DOMAIN 26..651: note = extracellular domain (ECD)
  DOMAIN 652..675: note = transmembrane region
  DOMAIN 676..1308: note = cytoplasmic domain
  DOMAIN 718..985: note = protein kinase
MKPATGLWVWVSLLVAAGTVQPSDSQSVCAGTENKLSSLSDLEQQYRALRKYYENCEVVMGNLEITSIEHNRDLSFLRSVREVTGYVLVALNQFRYLPLENLRIIRGTKLYEDRYALAIFLNYRKDGNFGLQELGLKNLTEILNGGVYVDQNKFLCYADTIHWQDIVRNPWPSNLTLVSTNGSSGCGRCHKSCTGRCWGPTENHCQTLTRTVCAEQCDGRCYGPYVSDCCHRECAGGCSGPKDTDCFACMNFNDSGACVTQCPQTFVYNPTTFQLEHNFNAKYTYGAFCVKKCPHNFVVDSSSCVRACPSSKMEVEENGIKMCKPCTDICPKACDGIGTGSLMSAQTVDSSNIDKFINCTKINGNLIFLVTGIHGDPYNAIEAIDPEKLNVFRTVREITGFLNIQSWPPNMTDFSVFSNLVTIGGRVLYSGLSLLILKQQGITSLQFQSLKEISAGNIYITDNSNLCYYHTINWTTLFSTINQRIVIRDNRKAENCTAEGMVCNHLCSSDGCWGPGPDQCLSCRRFSRGRICIESCNLYDGEFREFENGSICVECDPQCEKMEDGLLTCHGPGPDNCTKCSHFKDGPNCVEKCPDGLQGANSFIFKYADPDRECHPCHPNCTQGCNGPTSHDCIYYPWTGHSTLPQHARTPLIAAGVIGGLFILVIVGLTFAVYVRRKSIKKKRALRRFLETELVEPLTPSGTAPNQAQLRILKETELKRVKVLGSGAFGTVYKGIWVPEGETVKIPVAIKILNETTGPKANVEFMDEALIMASMDHPHLVRLLGVCLSPTIQLVTQLMPHGCLLEYVHEHKDNIGSQLLLNWCVQIAKGMMYLEERRLVHRDLAARNVLVKSPNHVKITDFGLARLLEGDEKEYNADGGKMPIKWMALECIHYRKFTHQSDVWSYGVTIWELMTFGGKPYDGIPTREIPDLLEKGERLPQPPICTIDVYMVMVKCWMIDADSRPKFKELAAEFSRMARDPQRYLVIQGDDRMKLPSPNDSKFFQNLLDEEDLEDMMDAEEYLVPQAFNIPPPIYTSRARIDSNRSEIGHSPPPAYTPMSGNQFVYRDGGFAAEQGVSVPYRAPTSTIPEAPVAQGATAEIFDDSCCNGTLRKPVAPHVQEDSSTQRYSADPTVFAPERSPRGELDEEGYMTPMRDKPKQEYLNPVEENPFVSRRKNGDLQALDNPEYHNASNGPPKAEDEYVNEPLYLNTFANTLGKAEYLKNNILSMPEKAKKAFDNPDYWNHSLPPRSTLQHPDYLQEYSTKYFYKQNGRIRPIVAENPEYLSEFSLKPGTVLPPPPYRHRNTVV

SEQ ID NO: 47 - protein, 1283 aa, Homo sapiens
  REGION 1..1283: note = Mature human HER4 (ErbB4) protein (minus the signal peptide)
  DOMAIN 1..625: note = Extracellular domain (ECD)
  DOMAIN 1..163: note = domain I of ECD
  DOMAIN 164..308: note = domain II of ECD
  DOMAIN 309..477: note = domain III of ECD
  DOMAIN 478..625: note = domain IV of ECD
QSVCAGTENKLSSLSDLEQQYRALRKYYENCEVVMGNLEITSIEHNRDLSFLRSVREVTGYVLVALNQFRYLPLENLRIIRGTKLYEDRYALAIFLNYRKDGNFGLQELGLKNLTEILNGGVYVDQNKFLCYADTIHWQDIVRNPWPSNLTLVSTNGSSGCGRCHKSCTGRCWGPTENHCQTLTRTVCAEQCDGRCYGPYVSDCCHRECAGGCSGPKDTDCFACMNFNDSGACVTQCPQTFVYNPTTFQLEHNFNAKYTYGAFCVKKCPHNFVVDSSSCVRACPSSKMEVEENGIKMCKPCTDICPKACDGIGTGSLMSAQTVDSSNIDKFINCTKINGNLIFLVTGIHGDPYNAIEAIDPEKLNVFRTVREITGFLNIQSWPPNMTDFSVFSNLVTIGGRVLYSGLSLLILKQQGITSLQFQSLKEISAGNIYITDNSNLCYYHTINWTTLFSTINQRIVIRDNRKAENCTAEGMVCNHLCSSDGCWGPGPDQCLSCRRFSRGRICIESCNLYDGEFREFENGSICVECDPQCEKMEDGLLTCHGPGPDNCTKCSHFKDGPNCVEKCPDGLQGANSFIFKYADPDRECHPCHPNCTQGCNGPTSHDCIYYPWTGHSTLPQHARTPLIAAGVIGGLFILVIVGLTFAVYVRRKSIKKKRALRRFLETELVEPLTPSGTAPNQAQLRILKETELKRVKVLGSGAFGTVYKGIWVPEGETVKIPVAIKILNETTGPKANVEFMDEALIMASMDHPHLVRLLGVCLSPTIQLVTQLMPHGCLLEYVHEHKDNIGSQLLLNWCVQIAKGMMYLEERRLVHRDLAARNVLVKSPNHVKITDFGLARLLEGDEKEYNADGGKMPIKWMALECIHYRKFTHQSDVWSYGVTIWELMTFGGKPYDGIPTREIPDLLEKGERLPQPPICTIDVYMVMVKCWMIDADSRPKFKELAAEFSRMARDPQRYLVIQGDDRMKLPSPNDSKFFQNLLDEEDLEDMMDAEEYLVPQAFNIPPPIYTSRARIDSNRSEIGHSPPPAYTPMSGNQFVYRDGGFAAEQGVSVPYRAPTSTIPEAPVAQGATAEIFDDSCCNGTLRKPVAPHVQEDSSTQRYSADPTVFAPERSPRGELDEEGYMTPMRDKPKQEYLNPVEENPFVSRRKNGDLQALDNPEYHNASNGPPKAEDEYVNEPLYLNTFANTLGKAEYLKNNILSMPEKAKKAFDNPDYWNHSLPPRSTLQHPDYLQEYSTKYFYKQNGRIRPIVAENPEYLSEFSLKPGTVLPPPPYRHRNTVV

SEQ ID NO: 48 - protein, 16 aa, synthetic construct
  REGION 1..16: note = cyclic FcRnBP
QRFCTGHFGGLYPCNG

SEQ ID NO: 49 - protein, 16 aa, synthetic construct
  REGION 1..16: note = cyclic FcRnBP
QRFCTGHFGGLHPCNG

SEQ ID NO: 50 - protein, 16 aa, synthetic construct
  REGION 1..16: note = linear FcRnBP
QRFVTGHFGGLYPANG

SEQ ID NO: 51 - protein, 16 aa, synthetic construct
  REGION 1..16: note = linear FcRnBP
QRFVTGHFGGLHPANG

SEQ ID NO: 52 - protein, 108 aa, synthetic construct
  REGION 1..108: note = DOM7h-11-3 (albumin-binding dAb)
DIQMTQSPSSLSASVGDRVTITCRASRPIGTTLSWYQQKPGKAPKLLILWNSRLQSGVPSRFSGSGSGTDFTLTISSLQPEDFATYYCAQAGTHPTTFGQGTKVEIKR

SEQ ID NO: 53 - protein, 120 aa, synthetic construct
  REGION 1..120: note = DOM1m-21-23 (mouse anti-TNFR1 dAb from DMS5540)
EVQLLESGGGLVQPGGSLRLSCAASGFTFNRYSMGWLRQAPGKGLEWVSRIDSYGRGTYYEDPVKGRFSISRDNSKNTLYLQMNSLRAEDTAVYYCAKISQFGSNAFDYWGQGTQVTVSS

SEQ ID NO: 54 - protein, 119 aa, synthetic construct
  REGION 1..119: note = DOM1h-574-208 (human anti-TNFR1 dAb from DMS5541)
EVQLLESGGGLVQPGGSLRLSCAASGFTFDKYSMGWVRQAPGKGLEWVSQISDTADRTYYAHAVKGRFTISRDNSKNTLYLQMNSLRAEDTAVYYCAIYTGRWVPFEYWGQGTLVTVSS

SEQ ID NO: 55 - protein, 119 aa, synthetic construct
  REGION 1..119: note = GSK1995057 (anti-TNFR1 antagonistic dAb)
EVQLLESGGGLVQPGGSLRLSCAASGFTFAHETMVWVRQAPGKGLEWVSHIPPDGQDPFYADSVKGRFTISRDNSKNTLYLQMNSLRAEDTAVYHCALLPKRGPWFDYWGQGTLVTVSS

SEQ ID NO: 56 - protein, 120 aa, synthetic construct
  REGION 1..120: note = GSK2862277 (anti-TNFR1 antagonistic dAb)
EVQLLESGGGLVQPGGSLRLSCAASGFTFAHETMVWVRQAPGKGLEWVSHIPPDGQDPFYADSVKGRFTISRDNSKNTLYLQMNSLRAEDTAVYHCALLPKRGPWFDYWGQGTLVTVSSA

SEQ ID NO: 57 - protein, 119 aa, synthetic construct
  REGION 1..119: note = DOMlh-574-16 anti-TNFR1 dAb
EVQLLESGGGLVQPGGSLRLSCAASGFTFVKYSMGWVRQAPGKGPEWVSQISNTGDRTYYADSVKGRFTISRDNSKNTLYLQMNSLRAEDTAVYYCAIYTGRWEPFDYWGQGTLVTVSS

SEQ ID NO: 58 - protein, 119 aa, synthetic construct
  REGION 1..119: note = DOMlh-549 anti-TNFR1 dAb
EVQLLESGGGLVQPGGSLRLSCAASGFTFVDYEMHWVRQAPGKGLEWVSSISESGTTTYYADSVKGRFTISRDNSKNTLYLQMNSLRAEDTAVYYCAKRRFSASTFDYWGQGTLVTVSS

SEQ ID NO: 59 - protein, 119 aa, synthetic construct; identical to SEQ ID NO: 55
  REGION 1..119: note = DOM1h-131-206 anti-TNFR1 dAb

SEQ ID NO: 60 - protein, 119 aa, synthetic construct
  REGION 1..119: note = DOM1h-131-511 anti-TNFR1 dAb
EVQLLESGGGLVQPGGSLRLSCAASGFTFAHETMVWVRQAPGKGLEWVSHIPPVGQDPFYADSVKGRFTISRDNSKNTLYLQMNSLRAEDTAVYYCALLPKRGPWFDYWGQGTLVTVSS

SEQ ID NO: 61 - protein, 119 aa, synthetic construct
  REGION 1..119: note = variant 1-1 of DOM1h-131-511 anti-TNFR1 dAb
EVQLLESGGGMVQPGGSLRLSCAASGFTFAHETMVWVRQAPGKGLEWVSHIPPVGQDPFYADSVKGRFTISRDNSKNTLYLQMNSLRAEDTAVYYCALLPKRGPWFDYWGQGTLVTVSS

SEQ ID NO: 62 - protein, 119 aa, synthetic construct
  REGION 1..119: note = variant 1-2 of DOM1h-131-511 anti-TNFR1 dAb
EVQLLESGGGLVQPGGSLRLSCAASGFAFAHETMVWVRQAPGKGLEWVSHIPPVGQDPFYADSVKGRFTISRDNSKNTLYLQMNSLRAEDTAVYYCALLPKRGPWFDYWGQGTLVTVSS

SEQ ID NO: 63 - protein, 119 aa, synthetic construct
  REGION 1..119: note = variant 1-3 of DOM1h-131-511 anti-TNFR1 dAb
EVQLLESGGGLVQPGGSLRLSCAASGFNFAHETMVWVRQAPGKGLEWVSHIPPVGQDPFYADSVKGRFTISRDNSKNTLYLQMNSLRAEDTAVYYCALLPKRGPWFDYWGQGTLVTVSS

SEQ ID NO: 64 - protein, 119 aa, synthetic construct
  REGION 1..119: note = DOM1h-131-201 anti-TNFR1 dAb
EVQLLESGGGLVQPGGSLRLSCAASGFTFAHETMVWVRQAPGKGLEWVSHIPPVGQDPFYADSVKGRFTISRDDSKNTLYLQMNSLRAEDTAVYYCALLPKRGPWFDYWGQGTLVTVSS

SEQ ID NO: 65 - protein, 119 aa, synthetic construct
  REGION 1..119: note = variant 1-5 of DOM1h-131-511 anti-TNFR1 dAb
EVQLLESGGGLVQPGGSLRLSCAASGFTFAHETMVWVRQAPGKGLEWVSHIPPVGQDPFYADSVKGRFTISRDNSKNTLYLQMNNLRAEDTAVYYCALLPKRGPWFDYWGQGTLVTVSS

SEQ ID NO: 66 - protein, 119 aa, synthetic construct
  REGION 1..119: note = variant 1-6 of DOM1h-131-511 anti-TNFR1 dAb
EVQLLESGGGLVQPGGSLRLSCAASGFTFAHETMVWVRQAPGKGLEWVSHIPPAGQDPFYADSVKGRFTISRDNSKSTLYLQMNGLRAEDTAVYYCALLPKRGPWFDYWGQGTLVTVSS

SEQ ID NO: 67 - protein, 119 aa, synthetic construct
  REGION 1..119: note = variant 1-7 of DOM1h-131-511 anti-TNFR1 dAb
EVQLLESGGGLVKPGGSLRLSCAASGFTFAHETMVWVRQAPGKGLEWVSHIPPAGQDPFYADSVKGRFTISRDNSKNTLYLQMNSLRAEDTAVYYCALLPKRGPWFDYWGQGTLVTVSS

SEQ ID NO: 68 - protein, 119 aa, synthetic construct
  REGION 1..119: note = DOM1h-131-202 anti-TNFR1 dAb
EVQLLESGGGLVQPGGSLRLSCAASGFTFAHETMVWVRQAPGKGLEWVSHIPPDGQDPFYADSVKGRFTISRDNSKNTLYLQMNSLRAEDTAVYYCALLPKRGPWFDYWGQGTLVTVSS

SEQ ID NO: 69 - protein, 119 aa, synthetic construct
  REGION 1..119: note = DOM1h-131-203 anti-TNFR1 dAb
EVQLWESGGGLVQPGGSLRLSCAASGFTFAHETMVWVRQAPGKGLEWVSHIPPDGQDPFYADSVKGRFTISRDNSKNTLYLQMNSLRAEDTAVYYCALLPKRGPWIDYWGQGTLVTVSS

SEQ ID NO: 70 - protein, 119 aa, synthetic construct
  REGION 1..119: note = DOM1h-131-204 anti-TNFR1 dAb
EVQLSESGGGLVQPGGSLRLSCAASGFTFAHETMVWVRQAPGKGLEWVSHIPPDGQDPFYADSVKGRFTISRDNSKNTLYLQMNSLRAEDTAVYYCALLPNRGPWFDYWGQGTLVTVSS

SEQ ID NO: 71 - protein, 119 aa, synthetic construct
  REGION 1..119: note = DOM1h-131-205 anti-TNFR1 dAb
EVQLLESGGGLVQPGGSLRLSCAASGFTFAHETMVWVRQAPGKGLEWVSHIPPDGQDPFYADSVKGRFTISRDNSKNTLYLQMNSLRAEDTAVYYCALLPKRGPWFDYWGQGTQVTVSS

SEQ ID NO: 72 - protein, 119 aa, synthetic construct
  REGION 1..119: note = variant 1-12 of DOM1h-131-511 anti-TNFR1 dAb
EVRLLESGGGLVQPGGSLRLSCTASGFTFAHETMVWVRQAPGKGLEWVSHIPPDGQDPFYADSVKSRFTISRDNSKNTLYLQMNSLRAEDTAVYYCALLPKRGPWFDYWGQGTQVTVSS

SEQ ID NO: 73 - protein, 119 aa, synthetic construct
  REGION 1..119: note = variant 1-13 of DOM1h-131-511 anti-TNFR1 dAb
EVRLLESGGGLVQPEGSLRLSCAASGFTFAHETMVWVRQAPGKGLEWVSHIPPDSQDPFYADSVKGRFTISRDNSKNTLYLQMNSLRAEDTAVYYCGLLPKRGPWFDYRGQGTLVTVSS

SEQ ID NO: 74 - protein, 119 aa, synthetic construct
  REGION 1..119: note = variant 1-14 of DOM1h-131-511 anti-TNFR1 dAb
EVQLLESGGGLVQPGGSLRLSCAASGFTIAHETMVWVRQAPGKGLEWVSHIPPVGQDPFYADSVKGRFTISRDNSKNTLYLQMNSLRAEDTAVYYCALLPKRGPWFDYRGQGTLVTVSS

SEQ ID NO: 75 - protein, 119 aa, synthetic construct
  REGION 1..119: note = variant 1-15 of DOM1h-131-511 anti-TNFR1 dAb
EVQLLESGGGLVQPGGSLRLSCAASGFTFAHETMVWVRQAPGKGLEWVSHIPPVGQDPFYADSVKGRFTISRDNSKNTLYLQMNSLRAEDTAVYYCARLPKRGPWFDYWGQGTLVTVSS

SEQ ID NO: 76 - protein, 119 aa, synthetic construct
  REGION 1..119: note = variant 1-18 of DOM1h-131-511 anti-TNFR1 dAb
EVQLLESGGGLVQPGGSLRLSCAASGFTFAHETMVWVRRAPGKGLEWVSHIPPDGQDPFYADSVKGRFTISRDNSKNTLYLQMNSLRAEDTAVYYCALLPKRGPWFDYWGQGTLVTVSS

SEQ ID NO: 77 - protein, 119 aa, synthetic construct
  REGION 1..119: note = variant 1-19 of DOM1h-131-511 anti-TNFR1 dAb
EVQLLESGGGLVQPGGSLRLSCAATGFTFAHETMVWVRQAPGRGLEWVSHIPPDGQDPFYADSVKGRFTISRDNSKNTLYLQMNSLRAEDTAVYYCALLPKRGPWFDYWGQGTLVTVSS

SEQ ID NO: 78 - protein, 119 aa, synthetic construct
  REGION 1..119: note = variant 1-20 of DOM1h-131-511 anti-TNFR1 dAb
EVQLLESGGGLVQPGGSLRLSCAASGFTFAHETMVWVRQAPGRGLEWVSHIPSDGQDPFYADSVKGRFTISRDNSKNTLYLQMNSLRAEDTAVYYCALLPKRGPWFDYWGQGTLVTVSS

SEQ ID NO: 79 - protein, 119 aa, synthetic construct
  REGION 1..119: note = variant 1-21 of DOM1h-131-511 anti-TNFR1 dAb
EVQLLESGGGLVQPGGSLRLSCAASGFTFAHETMVWVRQAPGKGLEWVSHIPPDGQDPFYADSVKGRFTISRDNSKNTLYLQMNSLRAEDTAVYYCALLPKKGPWFDYWGQGTLVTVSS

SEQ ID NO: 80 - protein, 119 aa, synthetic construct
  REGION 1..119: note = variant 1-22 of DOM1h-131-511 anti-TNFR1 dAb
EVQLLESGGGLVQPGGSLRLSCAASGFTFARETMVWVRQAPGKGLEWVSHIPPVGQDPFYADSVKGRFTISRDNSKNTLYLQMNSLRAEDTAVYYCALLPKRGPWFDYWGQGTLVTVSS

SEQ ID NO: 81 - protein, 119 aa, synthetic construct
  REGION 1..119: note = variant 1-23 of DOM1h-131-511 anti-TNFR1 dAb
EVQLLESGGGLVQPGGSLRLSCAASGFTFAQETMVWVRQAPGKGLEWVSHIPPVGQDPFYADSVKGRFTISRDNSKNTLYLQMNSLRAEDTAVYYCARLPKRGPWFDYWGQGTLVTVSS

SEQ ID NO: 82 - protein, 119 aa, synthetic construct
  REGION 1..119: note = variant 1-24 of DOM1h-131-511 anti-TNFR1 dAb
EVQLLESGGGLVQPGGSLRLSCAASGFTFAHETMVWVRQAPGKGLEWVSHIPPVGQDPFYADSVKGRFTISRDNSKNTLYLQMNSLRAEDTAVYYCALLPKKGPWFDYWGQGTLVTVSS

SEQ ID NO: 83 - protein, 119 aa, synthetic construct
  REGION 1..119: note = variant 1-25 of DOM1h-131-511 anti-TNFR1 dAb
EVQLLESGGGLVQPGGSLRLSCAASGFTFAHETMVWVRQAPGKGLEWVSHIPPAGQDPFYADSVKGRFTISRDNSKNTLYLQMNSLRAEDTAVYYCARLPKRGPWFDYWGQGTLVTVSS

SEQ ID NO: 84 - DNA, 357 bp, synthetic construct
  misc_feature 1..357: note = Codon Optimized Sequence 1 of DOM1h-131-206 anti-TNFR1 dAb
  source 1..357: mol_type = other DNA
gaggttcaattgttggaatccggtggtggattggttcaacctggtggttctttgagattgtcctgtgctgcttccggttttactttcgctcacgagactatggtttgggttagacaggctccaggtaaaggattggaatgggtttcccacattccaccagatggtcaagatccattctacgctgactccgttaagggaagattcactatctccagagacaactccaagaacactttgtacttgcagatgaactccttgagagctgaggatactgctgtttaccactgtgctttgttgccaaagagaggaccttggtttgattactggggacagggaactttggttactgtttcttcc

SEQ ID NO: 85 - DNA, 366 bp, synthetic construct
  misc_feature 1..366: note = Codon Optimized Sequence 2 of DOM1h-131-206 anti-TNFR1 dAb
  source 1..366: mol_type = other DNA
gagaaaagagaggttcaattgcttgaatctggaggaggtttggtccagccaggagggtcccttcgactaagttgtgctgccagtgggtttacgtttgctcatgaaactatggtatgggtccgacaggcacctggtaaaggtcttgaatgggtttcacatatccctccagacggtcaagacccattttacgctgattccgtgaaaggcagatttacaatttcacgagataattctaaaaacaccttgtacttacaaatgaactcattgagagctgaggacactgcagtttatcactgcgctttactaccaaaacgtggaccttggtttgattattggggccaaggtacgttagtgactgttagttct

SEQ ID NO: 86 - DNA, 357 bp, synthetic construct
  misc_feature 1..357: note = Codon Optimized Sequence 3 of DOM1h-131-206 anti-TNFR1 dAb
  source 1..357: mol_type = other DNA
gaagtgcagcttcttgaaagtggtggagggctagtgcagccagggggatctttaagattatcatgcgctgccagtggatttacttttgctcacgagacgatggtctgggtgagacaagctcctggaaaaggtttagagtgggtttctcacattccacctgatggtcaagatcctttctacgcagattccgtcaaaggaagatttactatctccagagataatagtaaaaacactttgtacctacagatgaactcacttagagccgaagataccgctgtgtaccactgcgccttgttgccaaagagaggtccttggttcgattactggggtcagggtactctggttacagtctcatct

SEQ ID NO: 87 - DNA, 357 bp, synthetic construct
  misc_feature 1..357: note = Codon Optimized Sequence 4 of DOM1h-131-206 anti-TNFR1 dAb
  source 1..357: mol_type = other DNA
gaggttcaactgctggaatctggtggtggtctggtacaaccgggtggttccctgcgtctgagctgtgcagcctctggtttcaccttcgctcatgagaccatggtttgggtacgccaggctccgggtaaaggcctggagtgggtaagccatatccctcctgatggtcaggacccgttctatgctgattccgtcaaaggccgttttaccatttctcgtgacaacagcaaaaacactctgtacctgcaaatgaactccctgcgtgcagaagacacggcggtttatcactgtgcactgctgccaaaacgcggcccttggttcgactactggggccagggtactctggtcactgtatcttct

SEQ ID NO: 88 - protein, 119 aa, synthetic construct; identical to SEQ ID NO: 55
  REGION 1..119: note = Codon Optimized Sequence 5 of DOM1h-131-206 anti-TNFR1 dAb

SEQ ID NO: 89 - protein, 120 aa, synthetic construct
  REGION 1..120: note = TAR2h-10 anti-TNFR1 dAb
EVQLLESGGGLVQPGGSLRLSCAASGFTFEWYWMGWVRQAPGKGLEWVSAISGSGGSTYYADSVKGRFTISRDNSKNTLYLQMNSLRAEDTAVYYCAKVKLGGGPNFDYWGQGTLVTVSS

SEQ ID NO: 90 - protein, 122 aa, synthetic construct
  REGION 1..122: note = TAR2h-12 anti-TNFR1 dAb
EVQLLESGGGLVQPGGSLRLSCAASGFTFVAYNMGWVRQAPGKGLEWVSFIDMYGAKTYYADSVKGRFTISRDNSKNTLYLQMNSLRAEDTAVYYCAKLCLMDCSGDIFDYWGQGTLVTVSS

SEQ ID NO: 91 - protein, 116 aa, synthetic construct
  REGION 1..116: note = TAR2h-13 anti-TNFR1 dAb
EVQLLESGGGLVQPGGSLRLSCAASGFTFPADEMYWVRQAPGKGLEWVSSIGWPGGATYYADSVKGRFTISRDNSKNTLYLQMNSLRAEDTAVYYCAKYGRNFDYWGQGTLVTVSS

SEQ ID NO: 92 - protein, 122 aa, synthetic construct
  REGION 1..122: note = TAR2h-14 anti-TNFR1 dAb
EVQLLESGGGLVQPGGSLRLSCAASGFTFDQYDMSWVRQAPGKGLEWVSLIDPSGGHTYYADSVKGRFTISRNNSKNTLYLQMNSLRAEDTAVYYCAKPVFSDWPAVEFDYWGQGTLVTVSS

SEQ ID NO: 93 - protein, 116 aa, synthetic construct
  REGION 1..116: note = TAR2h-16 anti-TNFR1 dAb
EVQLLESGGGLVQPGGSLRLSCAASGFTFGNYDMQWVRQAPGKGLEWVSSIDGTGGTTYYADSVKGRFTISRDNSKNTLYLQMNSLRAEDTAVYYCAQETNAFDYWGQGTLVTVSS

SEQ ID NO: 94 - protein, 124 aa, synthetic construct
  REGION 1..124: note = TAR2h-17 anti-TNFR1 dAb
EVQLLESGGGLVQPGGSLRLSCAASGFTFGGYQMGWVRQAPGKGLEWVSFIDFTGAHTYYADSVKGRFTISRDNSKNTLYLQMNSLRAEDTAVYYCAKLSDDLTLPERFPFDYWGQGTLVTVSS

SEQ ID NO: 95 - protein, 123 aa, synthetic construct
  REGION 1..123: note = TAR2h-18 anti-TNFR1 dAb
EVQLLESGGGLVQPGGSLRLSCAASGFTFADYNMTWVRQAPGKGLEWVSWIDQEGVFTYYADSVKGRFTISRDNSKNTLYLQMNSLRAEDTAVYYCAKDFSAAVMLRTSFDYWGQGTLVTVSS

SEQ ID NO: 96 - protein, 116 aa, synthetic construct
  REGION 1..116: note = TAR2h-19 anti-TNFR1 dAb
EVQLLESGGGLVQPGGSLRLSCAVSGFTFHDYGMVWVRQAPGKGLEWVSQISIDGRTTYYADSVKGRFTISRDNSKNTLYLQMNSLRAEDTAVYYCAKRIFEFDYWGQGTLVTVSS

SEQ ID NO: 97 - protein, 117 aa, synthetic construct
  REGION 1..117: note = TAR2h-20 anti-TNFR1 dAb
EVQLLESGGGLVQPGGSLRLSCAASGFTFSAYNMSWVRQAPGKGLEWVSAISPSGNETYYADSVKGRFTISRDNSKNTLYLQMNSLRAEDTAVYYCAKGAGEAFDYWGQGTLVTVSS

SEQ ID NO: 98 - protein, 117 aa, synthetic construct
  REGION 1..117: note = TAR2h-21 anti-TNFR1 dAb
EVQLLESGGGLVQPGGSLRLSCAASGFTFTEYNMGWVRQAPGKGLEWVSFIGHSGQHTYYADSVKGRFTISRDNSKNTLYLQMNSLRAEDTAVYYCAELNNLMFDYWGQGTLVTVSS

SEQ ID NO: 99 - protein, 121 aa, synthetic construct
  REGION 1..121: note = TAR2h-22 anti-TNFR1 dAb
EVQLLESGGGLVQPGGSLRLSCAASGFTFGEYNMAWVRQAPGKGQEWVSFISTGGHVTYYADSVKGRFTISRDNSKNTLYLQMNSLRAEDTAVYYCAKFSVRFRSSIFDYWGQGTLVTVSS

SEQ ID NO: 100 - protein, 122 aa, synthetic construct
  REGION 1..122: note = TAR2h-23 anti-TNFR1 dAb
EVQLLESGGGLVQPGGSLRLSCAASGYTFTEYTMGWVRQAPGKGLEWVSWIAVDGIHTYYADSVKGRFTISRDNSKNTLYLQMNSLRAEDTAVYYCAKLDWTATDFSIFDYWGQGTLVTVSS

SEQ ID NO: 101 - protein, 122 aa, synthetic construct
  REGION 1..122: note = TAR2h-24 anti-TNFR1 dAb
EVQLLESGGGLVQPGGSLRLSCAASGFTFANYTMLWVRQAPGKGLEWVSVISAEGRTTYYADSVKGRFTISRDNSKNTLYLQMNSLRAEDTAVYYCAKLNMKATNFKDFDYWGQGTLVTVSS

SEQ ID NO: 102 - protein, 122 aa, synthetic construct
  REGION 1..122: note = TAR2h-25 anti-TNFR1 dAb
EVQLLESGGGLVQPGGSLRLSCAASGFTFSEYAMLWVRQAPGKGLEWVSLIDRTGVITYYADSVKGRFTISRDNSKNTLYLQMNSLRAEDTAVYYCAKRDYQYHLYQDFDYRGQGTLVTVSS

SEQ ID NO: 103 - protein, 122 aa, synthetic construct
  REGION 1..122: note = TAR2h-26 anti-TNFR1 dAb
EVQLLESGGGLVQPGGSLRLSCAASGFTFATYSMGWVRQAPGKGLEWVSMIDPEGYHTYYADSVKGRFTISRDNSKNTLYLQMNSLRAEDTAVYYCAETNRPLTYKPWFDYWGQGTLVTVSS

SEQ ID NO: 104 - protein, 121 aa, synthetic construct
  REGION 1..121: note = TAR2h-27 anti-TNFR1 dAb
EVQLLESGGGLVQPGGSLRLSCAASGFTFTDYNMAWVRQAPGKGLEWVSFISQEGHHTYYADSVKGRFTISRDNSKNTLYLQMNSLRAEDTAVYYCAKFSTIATLSLFDYWGQGTLVTVSS

SEQ ID NO: 105 - protein, 122 aa, synthetic construct
  REGION 1..122: note = TAR2h-29 anti-TNFR1 dAb
EVQLLESGGGLVQPGGSLRLSCAASGFTFATYNMGWVRQAPGKGLEWVSSIAWLGSETYYADSVKGRFTISRDNSKNTLYLQMNSLRAEDTAVYYCAKHCKAECTGDLFDYWGQGTLVTVSS

SEQ ID NO: 106 - protein, 122 aa, synthetic construct
  REGION 1..122: note = TAR2h-30 anti-TNFR1 dAb
EVQLLESGGGLVQPGGALRLSCAASGFTFGIYSMGWVRQAPGKGLEWVSSISGVGMETYYADSVKGRFTISRDNSENTLYLQMNSLRAEDTAVYYCAKHSYPTRGRHLFDYWGQGTLVTVSS

SEQ ID NO: 107 - protein, 120 aa, synthetic construct
  REGION 1..120: note = TAR2h-32 anti-TNFR1 dAb
EVQLLESGGGLVQPGGSLRLSCAASGFTFEWYWMGWVRQAPGKGLEWVSAISGSGGSTYYADSVKGRFTISRDNSKNTLYLQMNSLRAEDTAVYYCAKVKLGGGPNFDYRGQGTLVTVSS

SEQ ID NO: 108 - protein, 120 aa, synthetic construct
  REGION 1..120: note = TAR2h-33 anti-TNFR1 dAb
EVQLLESGGGLVQPGGSLRLSCAASGFTFHRYSMGWVRQAPGKGLEWVSAISSSGGITYYADSVKGRFTISRDNSKNTLYLQMNSLRAEDTAVYYCAKSTQAQGLELDYWGQGTLVTVSS

SEQ ID NO: 109 - protein, 120 aa, synthetic construct
  REGION 1..120: note = TAR2h-10-1 anti-TNFR1 dAb
EVQLLESGGGLVQPGGSLRLSCAASGFTFEWYWMGWVRQAPGKGLEWVSAISGSGGSTYYADSVKGRFTISRDNSKNTLYLQMNNLRAEDTAVYYCAKVKLGGGPNFDYRGQGTLVTVSS

SEQ ID NO: 110 - protein, 120 aa, synthetic construct; identical to SEQ ID NO: 107
  REGION 1..120: note = TAR2h-10-2 anti-TNFR1 dAb

SEQ ID NO: 111 - protein, 120 aa, synthetic construct
  REGION 1..120: note = TAR2h-10-3 anti-TNFR1 dAb
EVQLLESGGGLVQPGGSLRLTCAASGFTFEWYWMGWVRQAPGKGLEWVSAISGSGGSTYYADSVKGRFTISRDNSKNTLYLQMNSLRAEDTAVYYCAKVKLGGGPNFDYWGQGTLVTVSS

SEQ ID NO: 112 - protein, 120 aa, synthetic construct
  REGION 1..120: note = TAR2h-10-4 anti-TNFR1 dAb
EVQLLESGGGLVQPGGSLRLSCAASGFTFEWYWMGWIRQAPGKGLEWVSAISGSGGSTYYADSVKGRFTISRDNSKNTLYLQMNSLRAEDTAVYYCAKVKLGGGPNFDYWGQGTLVTVSS

SEQ ID NO: 113 - protein, 120 aa, synthetic construct; identical to SEQ ID NO: 107
  REGION 1..120: note = TAR2h-10-5 anti-TNFR1 dAb

SEQ ID NO: 114 - protein, 120 aa, synthetic construct
  REGION 1..120: note = TAR2h-10-6 anti-TNFR1 dAb
EVQLLESGGGLVQPGGSLRLSCAASGFTFEWYWMGWVRQAPGKGPEWVSAISGSGGSTYYADSVKGRFTISRDNSKNTLYLQMNSLRAEDTAVYYCAKVKLGGGPNFDYRGQGTLVTVSS

SEQ ID NO: 115 - protein, 120 aa, synthetic construct
  REGION 1..120: note = TAR2h-10-7 anti-TNFR1 dAb
EVQLLESGGGLVQPGGSLRLSCAASGFTFEWYWMGWVRQAPGKGLEWVSAISGSGGSTYYADSVKGRFTISRDNSKNTLYLQMNSLRAKDTAVYYCAKVKLGGGPNFDYRGQGTLVTVSS

SEQ ID NO: 116 - protein, 120 aa, synthetic construct
  REGION 1..120: note = TAR2h-10-8 anti-TNFR1 dAb
EVQLLESGGGLVQPGGSLRLSCAASGFTFEWYWMGWVRQAPGKGLEWVSAISGSGGSTYYADSVKGRFTISRDNSKNTLYLQMNSLRAGDTAVYYCAKVKLGGGPNFDYRGQGTLVTVSS

SEQ ID NO: 117 - protein, 120 aa, synthetic construct
  REGION 1..120: note = TAR2h-10-9 anti-TNFR1 dAb
EVQLLESGGGLVQPGGSLRLSCAASGFTFEWYWMGWVRQAPGKGLEWVSAISGSGGRTYYADSVKGRFTISRDNSKNTLYLQMNSLRAEDTAVYYCAKVKLGGGPNFDYWGQGTLVTVSS

SEQ ID NO: 118 - protein, 120 aa, synthetic construct
  REGION 1..120: note = TAR2h-10-10 anti-TNFR1 dAb
EVQLLESGGGLVQPGGSLRLSCAASGFTFEWYWMGWVRQAPGKGLEWVSAISGSGGSTYYADSVKGRFTISRDNSKNTLYLQMNSLRAEDTAVYYCAKVKLGGGPNFDDRGQGTLVTVSS

SEQ ID NO: 119 - protein, 120 aa, synthetic construct
  REGION 1..120: note = TAR2h-10-11 anti-TNFR1 dAb
EVQLLESGGGLVQPGGSLRLSCAASGFTFEWYWMGWVRQAPGKGLEWVSAISGSGGSKYYADSVKGRFTISRDNSKNTLYLQMNSLRAEDTAVYYCAKVKLGGGPNFDYRGQGTLVTVSS

SEQ ID NO: 120 - protein, 120 aa, synthetic construct
  REGION 1..120: note = TAR2h-10-12 anti-TNFR1 dAb
EVQLLESGGGLVQPGGSLRLSCAASGFTFGWYWMGWVRQAPGKGLEWASAISGSGGNTYYADSVKGRFTISRDNSKNTLYLQMNSLRAEDTAVYYCAKVKLGGGPNFDYWGQGTLVTVSS

SEQ ID NO: 121 - protein, 120 aa, synthetic construct
  REGION 1..120: note = TAR2h-10-13 anti-TNFR1 dAb
EVQLLESGGGLVQPGGSLRLSCAASGFTFEWYWMGWVRQAPGKGLGWVSAISGSGGSTYYADSVRGRFTISRDNSKNTLYLQMNSLRAEDTAVYYCAKVKLGGGPNFDYRGQGTLVTVSS

SEQ ID NO: 122 - protein, 120 aa, synthetic construct
  REGION 1..120: note = TAR2h-10-14 anti-TNFR1 dAb
  VARIANT 20: note = Xaa = any amino acid
EVQLLESGGGLVQPGGSLRXSCAASGFTFEWYWMGWVRQAPGKGPEWVSAISGSGGSTYYADSVKGRFTISRDNSKNTLYLQMNSLRAEDTAVYYCAKVKLGGGPNFDYWGQGTLVTVSS

SEQ ID NO: 123 - protein, 120 aa, synthetic construct
  REGION 1..120: note = TAR2h-10-15 anti-TNFR1 dAb
EVQLLESGGGLVQPGGSLRLSCAASGFTFEWYWMGWVRQAPGKGLEWVSAISGSGGSTYYADSVKGRFTISRDNSKNTLYLQMNSLRAEDTAVYYCAKVKLGGGPNFDYRGRGTLVTVSS

SEQ ID NO: 124 - protein, 120 aa, synthetic construct
  REGION 1..120: note = TAR2h-10-16 anti-TNFR1 dAb
EVQLLESGGGLVQPGGSLRLSCAASGFTFEWYWMGWIRQAPGKGLEWVSAISGSGGSTYYADSVKGRFTISRDNSKNTLYLQMNSLRAKDTAVYYCAKVKLGGGPNFDYRGQGTLVTVSS

SEQ ID NO: 125 - protein, 120 aa, synthetic construct
  REGION 1..120: note = TAR2h-10-17 anti-TNFR1 dAb
EVQLLESGGGLVQPGGSLRLSCAASGFTFEWYWMGWIRQAPGKGLGWVSAISGSGGSTYYADSVRGRFTISRDNSKNTLYLQMNSLRAEDTAVYYCAKVKLGGGPNFDYRGQGTLVTVSS

SEQ ID NO: 126 - protein, 120 aa, synthetic construct; identical to SEQ ID NO: 120
  REGION 1..120: note = TAR2h-10-18 anti-TNFR1 dAb

SEQ ID NO: 127 - protein, 120 aa, synthetic construct
  REGION 1..120: note = TAR2h-10-19 anti-TNFR1 dAb
EVQLLESGGGLVQPGGSLRLSCAASGFTFEWYWMGWVRQAPGKGLGWVSAISGSGGSTYYADSVRGRFTISRDNSKNTLYLQMNSLRAKDTAVYYCAKVKLGGGPNFDYRGQGTLVTVSS

SEQ ID NO: 128 - protein, 120 aa, synthetic construct
  REGION 1..120: note = TAR2h-10-20 anti-TNFR1 dAb
EVQLLESGGGLVQPGGSLRLSCAASGFTFGWYWMGWVRQAPGKGLEWASAISGSGGNTYYADSVKGRFTISRDNSKNTLYLQMNSLRAKDTAVYYCAKVKLGGGPNFDYWGQGTLVTVSS

SEQ ID NO: 129 - protein, 120 aa, synthetic construct
  REGION 1..120: note = TAR2h-10-21 anti-TNFR1 dAb
EVQLLESGGGLVQPGGSLRLSCAASGFTFGWYWMGWVRQAPGKGLEWVSAISGSGGSTYYADSVKGRFTISRDNSKNTLYLQMNSLRAKDTAVYYCAKVKLGGGPNFDYRGQGTLVTVSS

SEQ ID NO: 130 - protein, 120 aa, synthetic construct
  REGION 1..120: note = TAR2h-10-22 anti-TNFR1 dAb
EVQLLESGGGLVQPGGSLRLSCAASGFTFGWYWMGWVRQAPGKGLGWVSAISGSGGSTYYADSVRGRFTISRDNSKNTLYLQMNSLRAEDTAVYYCAKVKLGGGPNFDYRGQGTLVTVSS

SEQ ID NO: 131 - protein, 120 aa, synthetic construct
  REGION 1..120: note = TAR2h-10-27 anti-TNFR1 dAb
EVQLLESGGGLVQPGGSLRLSCAASGFTFEWYWMGWVRQAPGKGLEWVSAISGSGGSTYYADSVKGRFTISRDNSKNTLYLQMNSLRAEDAAVYYCAKVKLGGGPNFGYRGQGTLVTVSS

SEQ ID NO: 132 - protein, 120 aa, synthetic construct
  REGION 1..120: note = TAR2h-10-29 anti-TNFR1 dAb
EVQLLESGGGLVQPGGSLRLSCAASGFDFEWYWMGWVRQAPGKGLEWVSAISGSGGSTYYADSVKGRFTISRDNSKNTLYLQMNSLRAEDAAVYYCAKVKLGGGPNFGYRGQGTLVTVSS

SEQ ID NO: 133 - protein, 120 aa, synthetic construct
  REGION 1..120: note = TAR2h-10-31 anti-TNFR1 dAb
EVQLLESGGGLVQPGGSLRLSCAASGFTFEWYWMGWVRQAPGKGLEWVSAISGSGGSTYYADSVKGRFTISRDNSKSTLYLQMNSLRAEDAAVYYCAKVKLGGGPNFGYRGQGTLVTVSS

SEQ ID NO: 134 - protein, 120 aa, synthetic construct
  REGION 1..120: note = TAR2h-10-35 anti-TNFR1 dAb
EVQLLESGGGLVQPGGSLRLSCAASGFDFEWYWMGWVRQAPGKGLEWVSAISGSGGSTYYADSVKGRFTISRDNSKNTLYLQMNSLHAEDAAVYYCAKVKLGGGPNFGYRGQGTLVTVSS

SEQ ID NO: 135 - protein, 120 aa, synthetic construct
  REGION 1..120: note = TAR2h-10-36 anti-TNFR1 dAb
EVQLLESGGGLVQPGGSLRLSCAVSGLTFEWYWMGWVRQAPGKGLEWVSAISGSGGSTYYADSVKGRFTISRDNSKNTLYLQMNSLRAEDAAVYYCAKVKLGGGPNFGYRGQGTLVTVSS

SEQ ID NO: 136 - protein, 120 aa, synthetic construct
  REGION 1..120: note = TAR2h-10-37 anti-TNFR1 dAb
EVQLLGSGGGLVQPGGSLRLSCAASGFTFAWYWMGWVRQAPGKGLEWVSAISGSGGSTYYADSVKGRFTISRDNSKNTLYLQMNSLRAEDAAVYYCAKVKLGGGPNFGYRGQGTLVTVSS

SEQ ID NO: 137 - protein, 120 aa, synthetic construct
  REGION 1..120: note = TAR2h-10-38 anti-TNFR1 dAb
EVQLLESGGGLVQPGGSLRLSCAASGFTFEWYWMGWVRQAPGKGLEWVSAISGSGGSTYYADSVKGRFTISRDNSKNTLYLQMNSLRAKDAAVYYCAKVKLGGGPNFGYRGQGTLVTVSS

SEQ ID NO: 138 - protein, 120 aa, synthetic construct
  REGION 1..120: note = TAR2h-10-45 anti-TNFR1 dAb
EVQLLESGGGLVQPGGSLRLSCAASGFTFEPYWMGWVRQAPGKGLEWVSAISGSGGSTYYADSVKGRFTISRDNSKNTLYLQMNSLRAEDAAVYYCAKVKLGGGPNFGYRGQGTLVTVSS

SEQ ID NO: 139 - protein, 120 aa, synthetic construct
  REGION 1..120: note = TAR2h-10-47 anti-TNFR1 dAb
EVQLLESGGGFVQPGGSLRLSCAASGFTFEWYWMSWVRQAPGKGLEWVSAISGSGGSTYYADSVKGRFTISRDNSKNTLYLQMNSLRAEDASVYYCAKVKLGGGPNFGYRGQGTLVTVSS

SEQ ID NO: 140 - protein, 120 aa, synthetic construct
  REGION 1..120: note = TAR2h-10-48 anti-TNFR1 dAb
EVQLLESGGGLVQPGGSLRLPCAASGFTFEWYWMTWVRQAPGKGLEWVSAISGSGGSTYYADSVKGRFTISRDNSKNTLYLQMNSLRAEDAAVYYCAKVKLGGGPNFGYRGQGTLVTVSS

SEQ ID NO: 141 - protein, 120 aa, synthetic construct
  REGION 1..120: note = TAR2h-10-57 anti-TNFR1 dAb
EVQLLESGGGLVQPGGSLRLSCAASGLTFEWYWMGWVRQAPGKGLEWVSAISGSGGSTYYADSVKGRFTISRDNSKNTLYLQMNSLRAEDAAVYYCAKVKLGGGPNFGYRGQGTLVTVSS

SEQ ID NO: 142 - protein, 120 aa, synthetic construct
  REGION 1..120: note = TAR2h-10-56 anti-TNFR1 dAb
EVQLLESGGGLVQPGGSLRLSCAASGLTFEWYWMGWVRQAPGKGLEWVSAVSGSGGSTYYADSVKGRFTISRDNSKNTLYLQMNSLRAEDAAVYYCAKVKLGGGPNFGYRGQGTLVTVSS

SEQ ID NO: 143 - protein, 120 aa, synthetic construct
  REGION 1..120: note = TAR2h-10-58 anti-TNFR1 dAb
EVQLLESGGGLVQPGGSLRLSCAASGLTFEWYWMGWVRQAPGKGLEWVSAISGSGDSTYYADSVKGRFTISRDNSKNTLYLQMNSLRAEDAAVYYCAKVKLGGGPNFGYRGQGTLVTVSS

SEQ ID NO: 144 - protein, 120 aa, synthetic construct
  REGION 1..120: note = TAR2h-10-66 anti-TNFR1 dAb
EVQLLESGGGLVQPGGSLRLSCAASGFTFEWYWMGWVRQAPGKGLEWVSAMSGSGGSTYYADSVKGRFTISRDNSKNTLYLQMNSLRAEDAAVYYCAKVKLGGGPNFGNRGLGTLVTVSS

SEQ ID NO: 145 - protein, 120 aa, synthetic construct
  REGION 1..120: note = TAR2h-10-64 anti-TNFR1 dAb
EVQLLESGGGSVQPGGSLRLSCAASGFTFDWYWMGWVRQAPGKGLEWASAISGSGGSTYYADSVKDRFTISRDNSKNTLYLQMNSLRAEDAAVYYCAKVKLGGGPDFGYRGQGTLVTVSS

SEQ ID NO: 146 - protein, 120 aa, synthetic construct
  REGION 1..120: note = TAR2h-10-65 anti-TNFR1 dAb
EVQLLESGGGLVQPGGSLRLSCAASGFTFEWYWMGWVRQAPGKGLEWVSAISGSGGSTYYADSVKGRFTISRDNSKNTLYLQMNSLRAEDGAVYYCAKVKLGGELNFGYRGQGTLVTVSS

SEQ ID NO: 147 - protein, 120 aa, synthetic construct
  REGION 1..120: note = TAR2h-10-68 anti-TNFR1 dAb
EVQLLESGGGLVQPGGSLRLSCAASGFTFEWYWMGWVRQAPGKGLEWVSAISGSGGSTYYADSVKGRFTISRDNSKNTLYLQMNSLRAEDAAVYYCAKVKLGGGPNFGNRGQGTPVTVSS

SEQ ID NO: 148 - protein, 120 aa, synthetic construct
  REGION 1..120: note = TAR2h-10-69 anti-TNFR1 dAb
EVQLLESGGGLVQPGGSLRLSCAASGFTFEWYWMGWVRQAPGKGLEWVSAISGSGGSTYYADSVKGRFTISRDNSKNTLYLQMNSLRPEDAAVYYCAKVKLGGGPNFGPRGQGTLVTVSS

SEQ ID NO: 149 - protein, 120 aa, synthetic construct
  REGION 1..120: note = TAR2h-10-67 anti-TNFR1 dAb
EVQLLESGGGLVQPGGSLRLSCAASGFTFEWYWMGWVRQAPGKGLEWVSAISGSGGSTYYADSVKGRFTISRDNSKNTLYLQMNSLRAEDAAVYYCAKVKLGGGPNFGNRGQGTLVTVSS

SEQ ID NO: 150 - protein, 120 aa, synthetic construct
  REGION 1..120: note = TAR2h-10-61 anti-TNFR1 dAb
EVQLLESGGGLVQPGGSLRLSCAASGFTIEWYWMGWVRQAPGKGLEWVSAISGSGGSTYYADSVKGRFTISRDNSKNTLYLQMNSLRAEDAAVYYCAKVKLGGGPNFGYRGQGTLVTVSS

SEQ ID NO: 151 - protein, 120 aa, synthetic construct
  REGION 1..120: note = TAR2h-10-62 anti-TNFR1 dAb
EVQLLESGGGLVQPGGSLRLSCAASGFTFEWYWMGWVRQAPGKGLEWVSAISGSGGSTFYADSVKGRFTISRDNSKNTLYLQMNSLRAEDAAVYYCAKVKLGGGPNFGYRGQGTLVTVSS

SEQ ID NO: 152 - protein, 120 aa, synthetic construct
  REGION 1..120: note = TAR2h-10-63 anti-TNFR1 dAb
EVQLLESGGGLVQPGGSLRLSCAASGFTFEWYWMGWVRQAPGKGLEWVTAISGSGGSTFYADSVKGRFTISRDNSKNTLYLQMNSLRAEDAAVYYCAKVKLGGGPNFGYRGQGTLVTVSS

SEQ ID NO: 153 - protein, 120 aa, synthetic construct
  REGION 1..120: note = TAR2h-10-60 anti-TNFR1 dAb
EVQLLESGGGLVQPGGSLRLSCAASGFSFEWYWMGWVRQAPGKGLEWVSAISGSGDSTYYADSVKGRFTISRDNSKNTLYLQMNSLRAEDAAVYYCAKVKLGGGPNFGYRGQGTLVTVSS

SEQ ID NO: 154 - protein, 120 aa, synthetic construct
  REGION 1..120: note = TAR2h-10-55 anti-TNFR1 dAb
EVQLLESGGGLVQPGGSLRLSCAASGFPFEWYWMGWVRQAPGKGLEWVSAISGSGDSTYYADSVKGRFTISRDNSKNTLYQQMNSLRAEDAAVYYCAKVKLGGGPNFGYRGQGTLVTVSS

SEQ ID NO: 155 - protein, 120 aa, synthetic construct
  REGION 1..120: note = TAR2h-10-59 anti-TNFR1 dAb
EVQLLESGGGLVQPGGSLRLSCAASGFSFEWYWMGWVRQAPGKGLEWVSAISGSGGSTYYADSVKGRFTISRDNSKNTLYLQMNSLRAEDAAVYYCAKVKLGGGPNFGYRGQGTLVTVSS

SEQ ID NO: 156 - protein, 120 aa, synthetic construct
  REGION 1..120: note = TAR2h-10-70 anti-TNFR1 dAb
EVQLLESGGGLVQPGGSLRLSCAASGFTFEWYWMGWVRQAPGKGLEWVSAISGSGGSTYYADSVKGRFTISRDNSKNTLYLQMNSLRAEDAAVYYCAKVKLGGGPNYGYRGQGTLVTVSS

SEQ ID NO: 157 - protein, 116 aa, synthetic construct
  REGION 1..116: note = TAR2h-5 anti-TNFR1 dAb
EVQLLESGGGLVQPGGSLRLSCAASGFTFDLYNMFWVRQAPGKGLEWVSFISQTGRLTWYADSVKGRFTISRDNSKNTLYLQMNSLRAEDTAVYYCAKTLEDFDYWGQGTLVTVSS

SEQ ID NO: 158 - protein, 119 aa, synthetic construct
  REGION 1..119: note = TAR2h-34 anti-TNFR1 dAb
EVQLLESGGGLVQPGGSLRLSCAASGFTFPEYGMAWVRQAPGKGLEWVSTISHGGEHTYYADSVKGRFTISRDNSKNTLYLQMNSLRAEDTAVYYCAQHPVSHPKFDYWGQGTLVTVSS

SEQ ID NO: 159 - protein, 116 aa, synthetic construct
  REGION 1..116: note = TAR2h-35 anti-TNFR1 dAb
EVQLLESGGGLVQPGGSLRLSCAASGFTFDAYNMFWVRQAPGKGLEWVSAISPSGRETYYADSVKGRFTISRDNSKNTLYLQMNSLRAEDTAVYYCAKRYPDFDYWGQGTLVTVSS

SEQ ID NO: 160 - protein, 119 aa, synthetic construct
  REGION 1..119: note = TAR2h-36 anti-TNFR1 dAb
EVQLLESGGGLVQPGGSLRLSCAASGFTFSDYTMGWVRQAPGKGLEWVSLIDRPGNHTYYADSVKGRFTISRDNSKNTLYLQMNSLRAEDTAVYYCAKWGLNVEDFDYWGQGTLVTVSS

SEQ ID NO: 161 - protein, 120 aa, synthetic construct
  REGION 1..120: note = TAR2h-37 anti-TNFR1 dAb
EVQLLESGGGLVQPGGSLRLSCAASGFTFIEYDMGWVRQAPGKGLEWVSMISSDGRLTYYADSVKGRFTISRDNSKNTLYLQMNSLRAEDTAVYYCAKTWDGLNRNFDYWGQGTLVTVSS

SEQ ID NO: 162 - protein, 119 aa, synthetic construct
  REGION 1..119: note = TAR2h-38 anti-TNFR1 dAb
EVQLLESGGGLVQPGGSLRLSCAASGFTFIGYNMYWVRQAPGKGLEWVSFISPSGRETYYADSVKGRFTISRDNSKNTLYLQMNSLRAEDTAVYYCAKTLSADGRFDYWGQGTLVTVSS

SEQ ID NO: 163 - protein, 120 aa, synthetic construct
  REGION 1..120: note = TAR2h-39 anti-TNFR1 dAb
EVQLLESGGGLVQPGGSLRLSCAASGFTFGSYDMGWVRQAPGKGLEWVSFIDVSGTLTYYADSVKGRFTISRDNSKNTLYLQMNSLRAEDTAVYYCAKTVELDGLDFDYWGQGTLVTVSS

SEQ ID NO: 164 - protein, 120 aa, synthetic construct
  REGION 1..120: note = TAR2h-40 anti-TNFR1 dAb
EVQLLESGGGLVQPGGSLRLSCAASGFTFADYDMGWVRQAPGKGLEWVSFIDSSGSRTYYADSVKGRFTISRDNSKNTLYLQMNSLRAEDTAVYYCAKTAEIVNSRFDYWGQGTLVTVSS

SEQ ID NO: 165 - protein, 120 aa, synthetic construct
  REGION 1..120: note = TAR2h-41 anti-TNFR1 dAb
EVQLLESGGGLVQPGGSLRLSCAASGFTFDKYQMGWVRQAPGKGLEWVSFIDSNGHHTYYADSVKGRFTISRDNSKNTLYLQMNSLRAEDTAVYYCAELDNLSITPFDYWGQGTLVTVSS

SEQ ID NO: 166 - protein, 120 aa, synthetic construct
  REGION 1..120: note = TAR2h-42 anti-TNFR1 dAb
EVQLLESGGGLVQPGGSLRLSCAASGFTFAKYNMYWVRQAPGKGLEWVSAISPKGQHTYYADSVKGRFTISRDNSKNTLYLQMNSLRAEDTAVYYCAEGMGSDAITFDYWGQGTLVTVSS

SEQ ID NO: 167 - protein, 122 aa, synthetic construct
  REGION 1..122: note = TAR2h-43 anti-TNFR1 dAb
EVQLLESGGGLVQPGGSLRLSCAASGFTFSDYTMGWARQAPGKGLEWVSFIDSDGLHTYYADSVKGRFTISRDNSKNTLYLQMNSLRAEDTAVYYCAQNPQYAYESSRFDYWGQGTLVTVSS

SEQ ID NO: 168 - protein, 121 aa, synthetic construct
  REGION 1..121: note = TAR2h-44 anti-TNFR1 dAb
EVQLLESGGGLVQPGGSLRLSCAASGFTFLQYPMVWVRQAPGKGLEWVSSILAPGGPTYYADSVKGRFTISRDNSKNSLYLQMNSLRAEDTAVYYCAKHPTHTPHPNFDYWGQGTLVTVSS

SEQ ID NO: 169 - protein, 122 aa, synthetic construct
  REGION 1..122: note = TAR2h-45 anti-TNFR1 dAb
EVQLLESGGGLVQPGGSLRLSCAASGFTFGGYRMAWVRQAPGKGLEWVSFIDSEGVLTYYADSVKGRFTISRDNSKNTLYLQMNSLRAEDTAVYYCAKLCSSNCNMRNFDYWGQGTLVTVSS

SEQ ID NO: 170 - protein, 124 aa, synthetic construct
  REGION 1..124: note = TAR2h-47 anti-TNFR1 dAb
EVQLLESGGGLVQPGGSLRLSCAASGFTFPVYNMAWVRQAPGKGLEWVSFIAGNGQQTYYADSVKGRFTISRDNSKNTLYLQMNSLRAEDTAVYYCAKFASKVSPMSLTDFDYWGQGTLVTVSS

SEQ ID NO: 171 - protein, 124 aa, synthetic construct
  REGION 1..124: note = TAR2h-48 anti-TNFR1 dAb
EVQLLESGGGLVQPGGSLRLSCAASGFTFHKYGMAWVRQAPGKGLEWVSFIDLAGLHTYYADSVRGRFTISRDNSKNTLYLQMNSLRAEDTAVYYCAKFATYSSGNEEQPFDYWGQGTLVTVSS

SEQ ID NO: 172 - protein, 123 aa, synthetic construct
  REGION 1..123: note = TAR2h-50 anti-TNFR1 dAb
EVQLLESGGGLVQPGGSLRLSCAASGFTFSAYNMAWVRQAPGKGLEWVSFIAQSGGHTYYADSVKGRFTISRDNSKNTLYLQMNSLRAEDTAVYYCAKFSHPDEEGTQMFDYWGQGTLVTVSS

SEQ ID NO: 173 - protein, 116 aa, synthetic construct
  REGION 1..116: note = TAR2h-51 anti-TNFR1 dAb
EVQLLESGGGLVQPGGSLRLSCAASGFTFATYNMSWVRQAPGKGLEWVSAIDAGGMHTYYADSVKGRFTISRDNSKNTLYLQMNSLRAEDTAVYYCAKGTEPFDYWGQGTLVTVSS

SEQ ID NO: 174 - protein, 116 aa, synthetic construct
  REGION 1..116: note = TAR2h-66 anti-TNFR1 dAb
  VARIANT 33: note = Xaa = any amino acid
EVQLLESGGGLVQPGGSLRLSCAASGFTFDEYXMGWVRQAPGKGLEWVSLISPRGSKTYYADSVKGRFTISRDNSKNTLYLQMNSLRAEDTAVYYCAKYKPPFDYWGQGTLVTVSS

SEQ ID NO: 175 - protein, 116 aa, synthetic construct
  REGION 1..116: note = TAR2h-67 anti-TNFR1 dAb
EVQLLESGGGLVQPGGSLRLSCAASGFTFEDYPMAWVRQAPGKGLEWVSFIGLKGIHTYYADSVKGRFTISRDNSKNTLYLQMNSLRAEDTAVYYCAKDLNNFDYWGQGTLVTVSS

SEQ ID NO: 176 - protein, 119 aa, synthetic construct
  REGION 1..119: note = TAR2h-68 anti-TNFR1 dAb
EVQLLESGGGLVQPGGSLRLSCAASGFTFGNGNMVWVRQAPGKGLEWVSHIDEYGTNTYYADSVKGRFTISRDNSKNTLYLQMNSLRAEDTAVYYCAKPRNDRPGFDYWGQGTLVTVSS

SEQ ID NO: 177 - protein, 124 aa, synthetic construct
  REGION 1..124: note = TAR2h-70 anti-TNFR1 dAb
EVQLLESGGGLVQPGGSLRLSCAASGFTFPTEHMYWVRQAPGKGLEWVSGIDTGGSHTYYADSVKGRFTISRDNSKNTLYLQMNSLRAEDTAVYYCAKGLHWSSDSGPVHFDYWGQGTLVTVSS

SEQ ID NO: 178 - protein, 121 aa, synthetic construct
  REGION 1..121: note = TAR2h-71 anti-TNFR1 dAb
EVQLLESGGGLVQPGGSLRLSCAASGFTFGNVDMHWVRQAPGKGLEWVSAISSAGGETYYADSVKGRFTISRDNSKNTLYLQMNSLRAEDTAVYYCAKRMLANSPLAFDYWGQGTLVTVSS

SEQ ID NO: 179 - protein, 116 aa, synthetic construct
  REGION 1..116: note = TAR2h-72 anti-TNFR1 dAb
EVQLLESGGGLVQPGGSLRLSCAASGFTFGYEPMAWVRQAPGKGLEWVSTISHTGRDTYYADSVKGRFTISRDNSKNTLYLQMNSLRAEDTAVYYCAKRWSSFDYWGQGTLVTVSS

SEQ ID NO: 180 - protein, 119 aa, synthetic construct
  REGION 1..119: note = TAR2h-73 anti-TNFR1 dAb
EVQLLESGGGLVQPGGSLRLSCAASGFTFPSEKMAWVRQAPGKGLEWVSSIDERGIMTYYADSVKGRFTISRDNSKNTLYLQMNSLRAEDTAVYYCAKRWTFNTAFDYWGQGTLVTVSS

SEQ ID NO: 181 - protein, 119 aa, synthetic construct
  REGION 1..119: note = TAR2h-74 anti-TNFR1 dAb
EVQLLESGGGLVQPGGSLRLSCAASGFTFSRENMHWVRQAPGKGLEWVSGIGPRGMPTYYADSVKGRFTISRDNSKNTLYLQMNSLRAEDTAVYYCAKGMNSHDGFDYWGQGTLVTVSS

SEQ ID NO: 182 - protein, 119 aa, synthetic construct
  REGION 1..119: note = TAR2h-75 anti-TNFR1 dAb
EVQLLESGGGLVQPGGSLRLSCAASGFTFNAYTMIWVRQAPGKGLEWVSYIDPHGTITYYADSVKGRFTISRDNSKNTLYLQMNSLRAEDTAVYYCAKLPRAAPRFDYWGQGTLVTVSS

SEQ ID NO: 183 - protein, 119 aa, synthetic construct
  REGION 1..119: note = TAR2h-76 anti-TNFR1 dAb
EVQLLESGGGLVQPGGSLRLSCAASGFTFDASEMDWVRQAPGKGLEWVSAISPSGSATYYADSVKGRFTISRDNSKNTLYLQMNSLRAEDTAVYYCAKWTPGRTTFDYWGQGTLVTVSS

SEQ ID NO: 184 - protein, 124 aa, synthetic construct; identical to SEQ ID NO: 177
  REGION 1..124: note = TAR2h-77 anti-TNFR1 dAb

SEQ ID NO: 185 - protein, 123 aa, synthetic construct
  REGION 1..123: note = TAR2h-78 anti-TNFR1 dAb
EVQLLESGGGLVQPGGSLRLSCAASGFTFKLYNMAWVRQAPGKGLEWVSFIAAAGPETYYADSVKGRFTISRDNSKNTLYLQMNSLRAEDTAVYYCAKLGDISSIPQHPFDYWGQGTLVTVSS

SEQ ID NO: 186 - protein, 119 aa, synthetic construct
  REGION 1..119: note = TAR2h-79 anti-TNFR1 dAb
EVQLLESGGGLVQPGGSLRLSCAASGFTFGNVDMHWVRQAPGKGLEWVSAISSAGGETYYADSVKGRFTISRDNSKNTLYLQMNSLRAEDTAVYYCAKSADITKGFDYWGQGTLVTVSS

SEQ ID NO: 187 - protein, 121 aa, synthetic construct
  REGION 1..121: note = TAR2h-15 anti-TNFR1 dAb
EVRLLESGGGLVQPGGSLRLSCAASGFTFGKYTMTWVRQAPGKGLEWVSHISDDGNSTYYADSVKGRFTISRDNSKNTLYLQMNSLRAEDTAVYYCAKVPILAPRNLFDYWGQGTLVTVSS

SEQ ID NO: 188 - protein, 119 aa, synthetic construct
  REGION 1..119: note = TAR2h-131-8 anti-TNFR1 dAb
EVQLLESGGGLIQPGGSLRLSCAASGFTFAHETMVWVRQAPGKGLEWVSHIDRVGQDTYYADSVKGRFTISRDNSKNTLYLQMNSLRAEDTAVYYCAKLPKRGPWFDYRGQGTLVTVSS

SEQ ID NO: 189 - protein, 119 aa, synthetic construct
  REGION 1..119: note = TAR2h-131-24 anti-TNFR1 dAb
EVQLLESGGGLIQPGGSLRLSCAASGFTFAHETMVWVRQAPGKGLEWVSHIDRVGQDTYYADSVKGRFTISRDNSKNTLYLQMNSLRAEDTAVYYCARLPKRGPWFDYRGQGTLVTVSS

SEQ ID NO: 190 - protein, 121 aa, synthetic construct
  REGION 1..121: note = TAR2h-15-8 anti-TNFR1 dAb
EVRLLESGGGLVQPGGSLRLSCVASGFTFGKSTMTWVRQAPGKGLEWVSHISDDGNSTYYADSVKGRFTISRDNSKNTLYLQMNSLRAEDTAVYYCAKVPILAPRNLFDYWGQGTLVTVSS

SEQ ID NO: 191 - protein, 121 aa, synthetic construct
  REGION 1..121: note = TAR2h-15-8-1 anti-TNFR1 dAb
EVRLLESGGGLVQPGGSLRLSCVASGFNFGKSTMTWVRQAPGKGLEWVSHISDDGNSTYYADSVKGRFTISRDNSKNTLYLQMNSLRAEDTAVYYCAKVPILAPRNLFDYWGQGTLVTVSS

SEQ ID NO: 192 - protein, 121 aa, synthetic construct
  REGION 1..121: note = TAR2h-15-8-2 anti-TNFR1 dAb
EVRLLESGGGLVQPGGSLRLSCVASGFTFGKGTMTWVRQAPGKGLEWVSHISDDGNSTYYADSVKGRFTISRDNSKNTLYLQMNSLRAEDTAVYYCAKVPILAPRNLFDYWGQGTLVTVSS

SEQ ID NO: 193 - protein, 122 aa, synthetic construct
  REGION 1..122: note = TAR2h-185-23 anti-TNFR1 dAb
  VARIANT 62: note = Xaa = any amino acid
EVQLLESGGGLVQPGGSLRLSCAASGFTFARYNMGWVRQAPGKGLEWVSLIDPSGGHTYYAXSVKGRSTISRNNSKNTLYLQMNSLRAEDTAVYYCGKPVFSDWPAVEFDYWGQGTLVTVSS

SEQ ID NO: 194 - protein, 119 aa, synthetic construct
  REGION 1..119: note = TAR2h-154-10-5 anti-TNFR1 dAb
EVQLLESGGGMVQPGGSLRLSCAAPGFTFEHEGMVWVRQAPGKGLEWVSHIGEDGQSTYYADSVKGRFTISRDNSKNTLYLQMNSLRAEDTAVYYCASIPKAGPSFDYWGQGTLVTVSS

SEQ ID NO: 195 - protein, 122 aa, synthetic construct
  REGION 1..122: note = TAR2h-14-2 anti-TNFR1 dAb
EVQLLESGGGLVQPGGSLRLSCAASGSTFDQYDMSWVRRAPGKGLEWVSLIDPSGGHTYYADSVKGRFTISRNNTKNTLYLQMNSLRAEDTAVYYCAKPVFSDWPAVEFDYWGQGTLVTVSS

SEQ ID NO: 196 - protein, 121 aa, synthetic construct
  REGION 1..121: note = TAR2h-151-8 anti-TNFR1 dAb
EVQLLESGGGLVQPGGSLRLSCAASGFTFDYGNMFWVRQAPGKGLEWISAISGSGGSTYYADSVKGRFTISRDNSKNTLYLQMNSLRAEDTAVYYCAKDMTTDSPPGFDYWGQGTLVTVSS

SEQ ID NO: 197 - protein, 122 aa, synthetic construct
  REGION 1..122: note = TAR2h-152-7 anti-TNFR1 dAb
EVQLLESGGGLVQPGGSLRLSCAASGFTFAKETMSWVRQAPGKGLEWVSWISPHGAHTFYADSVKGRFTISRDNSKNTLYLQMNSLRAEDTAVYYCAKPRFSYYPRVSFDYRGQGTLVTVSS

SEQ ID NO: 198 - protein, 116 aa, synthetic construct
  REGION 1..116: note = TAR2h-35-4 anti-TNFR1 dAb
EVQLLESGGGLVQPGGSLRLSCAASGFTFDAYNMFWFRQAPGKGPEWVSAIGPSGRETYYADSVKGRFTITRDNSKNTLYLQMNSLRAEDTAVYYCAKRYPDFDYWGQGTLVTVSS

SEQ ID NO: 199 - protein, 119 aa, synthetic construct
  REGION 1..119: note = TAR2h-154-7 anti-TNFR1 dAb
EVQLLESGGGLVQPGGSLRLSCAASGFTFEHEGMVWVRQAPGKGLEWVSHIGEDGQSTYYADSVKGRFTISRDNSRNTLYLQMNSLRAEDTAVYYCANIPKAGPSFDYWGQGTLVTVSS

SEQ ID NO: 200 - protein, 123 aa, synthetic construct; identical to SEQ ID NO: 185
  REGION 1..123: note = TAR2h-80 anti-TNFR1 dAb

SEQ ID NO: 201 - protein, 119 aa, synthetic construct; identical to SEQ ID NO: 181
  REGION 1..119: note = TAR2h-81 anti-TNFR1 dAb

SEQ ID NO: 202 - protein, 121 aa, synthetic construct
  REGION 1..121: note = TAR2h-82 anti-TNFR1 dAb
EVQLLESGGGLVQPGGSLRLSCAASGFTFDASEMDWVRQAPGKGLEWVSAISPSGSATYYADSVKGRFTISRDNSKNTLYLQMNSLRAEDTAVYYCAKRMLANSPLAFDYWGQGTLVTVSS

SEQ ID NO: 203 - protein, 123 aa, synthetic construct; identical to SEQ ID NO: 172
  REGION 1..123: note = TAR2h-83 anti-TNFR1 dAb

SEQ ID NO: 204 - protein, 120 aa, synthetic construct
  REGION 1..120: note = TAR2h-84 anti-TNFR1 dAb
EVQLLESGGGLVQPGGSLRLSCAASGFTFADYQMAWVRQAPGKGLEWVSRIDRGGFHTYYADSVKGRFTISRDNSKNTLYLQMNSLRAEDTAVYYCAKPSWHADQYFDYWGQGTLVTVSS

SEQ ID NO: 205 - protein, 120 aa, synthetic construct
  REGION 1..120: note = TAR2h-85 anti-TNFR1 dAb
EVQLLESGGGLVQPGGSLRLSCAASGFTFKDYNMMWVRQAPGKGLEWVSAIATSGRETYYADSVKGRFTISRDNSKNTLYLQMNSLRAEDTAVYYCAKFTFGGNQDFDYWGQGTLVTVSS

SEQ ID NO: 206 - protein, 120 aa, synthetic construct; identical to SEQ ID NO: 166
  REGION 1..120: note = TAR2h-86 anti-TNFR1 dAb

SEQ ID NO: 207 - protein, 123 aa, synthetic construct; identical to SEQ ID NO: 172
  REGION 1..123: note = TAR2h-87 anti-TNFR1 dAb

SEQ ID NO: 208 - protein, 122 aa, synthetic construct
  REGION 1..122: note = TAR2h-88 anti-TNFR1 dAb
EVQLLESGGGLVQPGGSLRLSCAASGFTFERYDMFWVRQAPGKGLEWVSGISPRGRETYYADSVKGRFTISRDNSKNTLYLQMNSLRAEDTAVYYCAKDMINYHGTPSFDYWGQGTLVTVSS

SEQ ID NO: 209 - protein, 122 aa, synthetic construct
  REGION 1..122: note = TAR2h-89 anti-TNFR1 dAb
  VARIANT 30: note = Xaa= Any Amino Acid
EVQLLESGGGLVQPGGSLRLSCAASGFTFXNYNMVWVRQAPGKGLEWVSWISGAGHSTYYADSVKGRFTISRDNSKNTLYLQMNSLRAEDTAVYYCAKDVDMAGKLNVFDYWGQGTLVTVSS

SEQ ID NO: 210 - protein, 122 aa, synthetic construct
  REGION 1..122: note = TAR2h-90 anti-TNFR1 dAb
EVQLLESGGGLVQPGGSLRLSCAASGFTFKQYNMYWVRQAPGKGLEWVSFISPSGGETYYADSVKGRFTTSRDNSKNTLYLQMNSLRAEDTAVYYCAKDVDMAGKLNVFDYWGQGTLVTVSS

SEQ ID NO: 211 - protein, 120 aa, synthetic construct; identical to SEQ ID NO: 204
  REGION 1..120: note = TAR2h-91 anti-TNFR1 dAb

SEQ ID NO: 212 - protein, 120 aa, synthetic construct
  REGION 1..120: note = TAR2h-92 anti-TNFR1 dAb
EVQLLESGGGLVQPGGSLRLTCAASGFTFDDVNMTWVRQAPGKGLEWVSAIGPSGTETYYADSVKGRFTISRDNSKNTLYLQMNSLRAEDTAVYYCAKHSKTGSAMFDYWGQGTLVTVSS

SEQ ID NO: 213 - protein, 119 aa, synthetic construct; identical to SEQ ID NO: 176
  REGION 1..119: note = TAR2h-93 anti-TNFR1 dAb

SEQ ID NO: 214 - protein, 119 aa, synthetic construct; identical to SEQ ID NO: 181
  REGION 1..119: note = TAR2h-94 anti-TNFR1 dAb

SEQ ID NO: 215 - protein, 117 aa, synthetic construct
  REGION 1..117: note = TAR2h-95 anti-TNFR1 dAb
EVQLLESGGGLVQPGGSLRLSCAASGFTFKGSNMGWVRQAPGKGLEWVSLIDGRGQHTYYADSVKGRFTISRDNSKNTLYLQMNSLRAEDTAVYYCAKPSVREFDYRGQGTLVTVSS

SEQ ID NO: 216 - protein, 121 aa, synthetic construct
  REGION 1..121: note = TAR2h-96 anti-TNFR1 dAb
EVQLLESGGGLVQPGGSLRLSCAASGFTFSRENMHWVRQAPGKGLEWVSGIGPRGMPTYYADSVKGRFTISRDNSKNTLYLQMNSLRAEDTAVYYCAKRMLANSPLAFDYWGQGTLVTVSS

SEQ ID NO: 217 - protein, 116 aa, synthetic construct
  REGION 1..116: note = TAR2h-97 anti-TNFR1 dAb
EVQLLESGGGLVQPGGSLRLSCTASGFTFSESTMNWVRQAPGKGLEWVSVITAQGGDTYYADSVKGRFTISRDNSKNTLYLQMNSLRAEDTAVYYCAKPDVLFDYWGQGTLVTVSS

SEQ ID NO: 218 - protein, 117 aa, synthetic construct
  REGION 1..117: note = TAR2h-99 anti-TNFR1 dAb
EVQLLESGGGLVQPGGSLRLSCAASGFTFEEYNMLWVRQAPGKGLEWVSGIGPSGRETYYADSVKGRFTISRDNSKNTLYLQMNSLRAEDTAVYYCAKGSITLFDYWGQGTLVTVSS

SEQ ID NO: 219 - protein, 124 aa, synthetic construct
  REGION 1..124: note = TAR2h-100 anti-TNFR1 dAb
EVQLLESGGGLVQPGGSLRLSCAASGFTFSGYNMYWVRQAPGKGLEWVSAIDAYGTHTYYADSVKGRFTISRDNSKNTLYLQMNSLRAEDTAVYYCAEGLQTSDHGERISFDYWGQGTLVTVSS

SEQ ID NO: 220 - protein, 122 aa, synthetic construct; identical to SEQ ID NO: 92
  REGION 1..122: note = TAR2h-101 anti-TNFR1 dAb

SEQ ID NO: 221 - protein, 122 aa, synthetic construct; identical to SEQ ID NO: 92
  REGION 1..122: note = TAR2h-102 anti-TNFR1 dAb

SEQ ID NO: 222 - protein, 120 aa, synthetic construct
  REGION 1..120: note = TAR2h-103 anti-TNFR1 dAb
EVQLLESGGGLVQPGGSLRLSCAASGFTFTRYSMGWVRQAPGKGLEWVSMIDVPGLHTYYADSVKGRFTISRDNSKNTLYLQMNSLRAEDTAVYYCAKISQFGSNAFDYWGQGTLVTVSS

SEQ ID NO: 223 - protein, 120 aa, synthetic construct
  REGION 1..120: note = TAR2h-104 anti-TNFR1 dAb
  VARIANT 62: note = Xaa= Any Amino Acid
  VARIANT 104: note = Xaa= Any Amino Acid
EVQLLESGGGLVQPGGSLRLSCAASGFTFEWYWMGWVRQAPGKGLEWVSAISGSGGSTYYAXSVKGRFTISRDNSKNTLYLQMNSLRAEDAAVYYCAKVKLGGXPNFGYRGQGTLVTVSS

SEQ ID NO: 224 - protein, 120 aa, synthetic construct
  REGION 1..120: note = TAR2h-105 anti-TNFR1 dAb
EVQLLESGGGLVQPGGSLRLSCAASGFTFTRYSMGWVRQAPGKGLEWVSFIDPPSVHTYYADSVKGRFTISRDNSKNTLYLQMNSLRAEDTAVYYCAKISQFGSNAFDYWGQGTLVTVSS

SEQ ID NO: 225 - protein, 120 aa, synthetic construct
  REGION 1..120: note = TAR2h-106 anti-TNFR1 dAb
  VARIANT 62: note = Xaa= Any Amino Acid
EVQLLESGGGLVQPGGSLRLSCAASGFTFTRYSMGWVRQAPGKGLEWVSMIDVGGSHTYYAXSVKGRFTISRDNSKNTLYLQMNSLRAEDTAVYYCAKISQFGSNAFDYWGQGTLVTVSS

SEQ ID NO: 226 - protein, 120 aa, synthetic construct
  REGION 1..120: note = TAR2h-107 anti-TNFR1 dAb
  VARIANT 62: note = Xaa= Any Amino Acid
EVQLLESGGGLVQPGGSLRLSCAASGFTFTRYSMGWVRQAPGKGLEWVSMIDTGGVHTYYAXSVKGRFTISRDNSKNTLYLQMNSLRAEDTAVYYCAKISQFGSNAFDYWGQGTLVTVSS

SEQ ID NO: 227 - protein, 120 aa, synthetic construct
  REGION 1..120: note = TAR2h-108 anti-TNFR1 dAb
EVQLLESGGGLVQPGGSLRLSCAASGFTFTRYSMGWVRQAPGKGLEWVSMIDVPGRHTYYADSVKGRFTISRDNSKNTLYLQMNSLRAEDTAVYYCAKISQFGSNAFDYWGQGTLVTVSS

SEQ ID NO: 228 - protein, 120 aa, synthetic construct
  REGION 1..120: note = TAR2h-109 anti-TNFR1 dAb
EVQLLESGGGLVQPGGSLRLSCAASGFTFTRYSMGWVRQAPGKGLEWVSMIAHAGPETYYADSVKGRFTISRDNSKNTLYLQMNSLRAEDTAVYYCAKISQFGSNAFDYWGQGTLVTVSS

SEQ ID NO: 229 - protein, 120 aa, synthetic construct
  REGION 1..120: note = TAR2h-110 anti-TNFR1 dAb
EVQLLESGGGLVQPGGSLRLSCAASGFTFTRYSMGWVRQAPGKGLEWVSMIDTRGVRTYYADSVKGRFTISRDNSKNTLYLQMNSLRAEDTAVYYCAKISQFGSNAFDYWGQGTLVTVSS

SEQ ID NO: 230 - protein, 120 aa, synthetic construct
  REGION 1..120: note = TAR2h-111 anti-TNFR1 dAb
EVQLLESGGGLVQPGGSLRLSCAASGFTFTRYSMGWVRQAPGKGLEWVSMIDVPGNHTYYADSVKGRFTISRDNSKNTLYLQMNSLRAEDTAVYYCAKISQFGSNAFDYWGQGTLVTVSS

SEQ ID NO: 231 - protein, 120 aa, synthetic construct
  REGION 1..120: note = TAR2h-112 anti-TNFR1 dAb
EVQLLESGGGLVQPGGSLRLSCAASGFTFTRYSMGWVRQAPGKGLEWVSMIDVGGRHTYYADSVKGRFTISRDNSKNTLYLQMNSLRAEDTAVYYCAKISQFGPNAFDYWGQGTLVTVSS

SEQ ID NO: 232 - protein, 118 aa, synthetic construct
  REGION 1..118: note = TAR2h-113 anti-TNFR1 dAb
EVQLLESGGGSVQPGGSLRLSCAASGFTFTRYSMGWVRQAPGKGLEWVSRIDSYGRGTYYADSVKGRFTISRDNSKNTLYLQMNSLRAEDTAVYYCAKVRSPYTFDYWGQGTLVTVSS

SEQ ID NO: 233 - protein, 117 aa, synthetic construct
  REGION 1..117: note = TAR2h-114 anti-TNFR1 dAb
EVQLLESGGGLVQPGGSLRLSCAASGFTFSGYNMGWVRQAPGKGLEWVSTISTQGYHTYYADSVKGRFTISRDNSKNTLYLQMNSLRAEDTAVYYCAKAFTSDFDYWGQGTLVTVSS

SEQ ID NO: 234 - protein, 119 aa, synthetic construct
  REGION 1..119: note = TAR2h-115 anti-TNFR1 dAb
EVQLLESGGGLVQPGGSLRLSCAASGFTFSGYNMYWVRQAPGKGLEWVSGISGPGLETYYADSVKGRFTISRDNSKNTLYLQMNSLRAEDTAVYYCAQGMSKTSTFDYWGQGTLVTVSS

SEQ ID NO: 235 - protein, 117 aa, synthetic construct
  REGION 1..117: note = TAR2h-116 anti-TNFR1 dAb
EVQLLESGGGLVQPGGSLRLSCAASGFTFTEYYMEWVRQAPGKGLEWVSSIDPDGSLTYYADSVKGRFTISRDNSKNTLYLQMNSLRAEDTAVYYCAKYPREKFDYWGQGTLVTVSS

SEQ ID NO: 236 - protein, 120 aa, synthetic construct
  REGION 1..120: note = TAR2h-117 anti-TNFR1 dAb
EVQLLESGGGLVQPGGSLRLSCAASGFTFDKYQMGWVRQAPGKGLEWVSFIDSNGHHTYYADSVKGRFTISRDNSKNTLYLQMNSLRAEDTAVYYCAQLSVQGSNLFDYWGQGTLVTVSS

SEQ ID NO: 237 - protein, 120 aa, synthetic construct
  REGION 1..120: note = TAR2h-118 anti-TNFR1 dAb
EVQLLESGGGLVQPGGSLRLSCAASGFTFVHYTMGWVRQAPGKGLEWVSWIHSDGVHTYYADSVKGRFTISRDNSKNTLYLQMNSLRAEDTAVYYCAKFTWGEKKTFDYWGQGTLVTVSS

SEQ ID NO: 238 - protein, 120 aa, synthetic construct
  REGION 1..120: note = TAR2h-119 anti-TNFR1 dAb
EVQLLESGGGLVQPGGSLRLSCAASGFTFMGYDMHWVRQAPGKGLEWVSGISAKGTETYYADSVKGRFTISRDNSKNTLYLQMNSLRAEDTAVYYCAKGSSGSDGLFDYWGQGTLVTVSS

SEQ ID NO: 239 - protein, 124 aa, synthetic construct; identical to SEQ ID NO: 170
  REGION 1..124: note = TAR2h-120 anti-TNFR1 dAb

SEQ ID NO: 240 - protein, 124 aa, synthetic construct
  REGION 1..124: note = TAR2h-121 anti-TNFR1 dAb
EVQLLESGGGLVQPGGSLRLSCAASGFTFVQYNMHWVRQAPGKGLEWVSGISSGGMRTYYADSVKGRFTISRDNSKNTLYLQMNSLRAEDTAVYYCAKGIRDSTLPRGTLFDYWGQGTLVTVSS

SEQ ID NO: 241 - protein, 121 aa, synthetic construct
  REGION 1..121: note = TAR2h-122 anti-TNFR1 dAb
EVQLLESGGGLVQPGGSLRLSCAASGFTFETYSMHWVRQAPGKGLEWVSSISLPGSRTYYADSVKGRFTISRDNSKNTLYLQMNSLRAEDTAVYYCAKHSKSSHRQSFDYWGQGTLVTVSS

SEQ ID NO: 242 - protein, 122 aa, synthetic construct
  REGION 1..122: note = TAR2h-123 anti-TNFR1 dAb
EVQLLESGGGLVQPGGSLRLSCAASGFTFNQYDMHWVRQAPGKGLEWVSGISFSGYETYYADSVKGRFTISRDNSKNTLYLQMNSLRAEDTAVYYCAKGRGPAPMRSLFDYWGQGTLVTVSS

SEQ ID NO: 243 - protein, 120 aa, synthetic construct
  REGION 1..120: note = TAR2h-124 anti-TNFR1 dAb
EVQLLESGGGLVQPGGSLRLSCAASGFTFVDYPMVWVRQAPGKGLEWVSHITSMGESTYYADSVKGRFTISRDNSKNMLYLQMNSLRAEDTAVYYCAKLPTHFPIRFDYWGQGTLVTVSS

SEQ ID NO: 244 - protein, 116 aa, synthetic construct
  REGION 1..116: note = TAR2h-125 anti-TNFR1 dAb
EVQLLESGGGLVQPGGSLRLSCAASGFTFKQYNMYWVRQAPGKGLEWVSFISPSGGETYYADSVKGRFTISRDNSKNTLYLQMNSLRAEDTAVYYCAKSIKPFDYWGQGTLVTVSS

SEQ ID NO: 245 - protein, 120 aa, synthetic construct
  REGION 1..120: note = TAR2h-126 anti-TNFR1 dAb
EVQLLESGGGLVQPGGSLRLSCAASGFTFSMYSMAWVRQAPGKGLEWVSFIDFDGLHTYYADSVKGRFTISRDNSKNTLYLQMNSLRAEDTAVYYCAKFSTSTMALFDYWGQGTLVTVSS

SEQ ID NO: 246 - protein, 122 aa, synthetic construct
  REGION 1..122: note = TAR2h-127 anti-TNFR1 dAb
EVQLLESGGGLVRPGGSLRLSCAASGFTFPEYNMHWVRQAPGKGLEWVSAIGTAGGSTYYADSVKGRFTISRDNSKNMLYLQMNSLRAEDTAVYYCAKGYRPRTGSMLFDYWGQGTLVTVSS

SEQ ID NO: 247 - protein, 120 aa, synthetic construct
  REGION 1..120: note = TAR2h-128 anti-TNFR1 dAb
EVQLLESGGGLVQPGGSLRLSCAASGFTFAKYNMYWVRQAPGKGLEWVSAISPKGQQTYYADSVKGRFTISRDNSKNTLYLQMNSLRAEDTAVYYCAEGMGSDAITFDYWGQGTLVTVSS

SEQ ID NO: 248 - protein, 122 aa, synthetic construct
  REGION 1..122: note = TAR2h-129 anti-TNFR1 dAb
EVQLLESGGGLVQPGGSLRLSCAASGFTFADYDMAWVRQAPGKGLEWVSFIDRKGHHTYYADSVKGRFTISRDNSKNTLYLQMNSLRAEDTAVYYCAKTTDIQRLNSAFDYWGQGTLVTVSS

SEQ ID NO: 249 - protein, 119 aa, synthetic construct
  REGION 1..119: note = TAR2h-130 anti-TNFR1 dAb
EVQLLESGGGLVQPGGSLRLSCAASGFTFGNGVMAWVRQAPGKGLEWVSHINENGGATYYADSVKGRFTISRDNSKNTLYLQMNSLRAEDTAVYYCAKPSIESPIFDYWGQGTLVTVSS

SEQ ID NO: 250 - protein, 119 aa, synthetic construct
  REGION 1..119: note = TAR2h-131 anti-TNFR1 dAb
EVQLLESGGGLVQPGGSLRLSCAASGFTFAHEPMVWVRQAPGKGLEWVSHIDRVGQDTYYADSVKGRFTISRDNSKNTLYLQMNSLRAEDTAVYYCAKLPKRGPRFDYWGQGTLVTVSS

SEQ ID NO: 251 - protein, 121 aa, synthetic construct
  REGION 1..121: note = TAR2h-132 anti-TNFR1 dAb
EVQLLESGGGLVQPGGSLRLSCAASGFTFEESVMGWVRQAPGKGLEWVSAISPGGSETYYADSVKGRFTISRDNSKNTLYLQMNSLRAEDAAVYYCAKRTGPPGSTVFDYWGQGTLVTVSS

SEQ ID NO: 252 - protein, 116 aa, synthetic construct
  REGION 1..116: note = TAR2h-133 anti-TNFR1 dAb
EVQLLESGGGLVQPGGSLRLSCAASGFTFGDEPMHWVRQAPGKGLEWVSGIGKEGQPTYYADSVKGRFTISRDNSKNTLYLQMNSLRAEDTAVYYCAKLGGPFDYWGQGTLVTVSS

SEQ ID NO: 253 - protein, 121 aa, synthetic construct
  REGION 1..121: note = TAR2h-151 anti-TNFR1 dAb
EVQLLESGGGLVQPGGSLRLSCAASGFTFDYGNMFWVRQAPGKGLEWVSAISGSGGSTYYADSVKGRFTISRDNSKNTLYLQMNSLRAEDTAVYYCAKDMTTDSPPGFDYWGQGTLVTVSS

SEQ ID NO: 254 - protein, 122 aa, synthetic construct
  REGION 1..122: note = TAR2h-152 anti-TNFR1 dAb
EVQLLESGGGLVQPGGSLRLSCAASGFTFAKETMSWVRQAPGKGLEWVSWISPHGALTYYADSVKGRFTISRDNSKNTLYLQMNSLRAEDTAVYYCAKPRFSYYPRVSFDYWGQGTLVTVSS

SEQ ID NO: 255 - protein, 119 aa, synthetic construct; identical to SEQ ID NO: 176
  REGION 1..119: note = TAR2h-153 anti-TNFR1 dAb

SEQ ID NO: 256 - protein, 119 aa, synthetic construct
  REGION 1..119: note = TAR2h-154 anti-TNFR1 dAb
  VARIANT 53: note = Xaa = Any Amino Acid
EVQLLESGGGLVQPGGSLRLSCAASGFTFGNGNMVWVRQAPGKGLEWVSHIDXYGTNTYYADSVKGRFTISRDNSKNTLYLQMNSLRAGDTAVYYCAKPRNDRPGFDYWGQGTLVTVSS

SEQ ID NO: 257 - protein, 124 aa, synthetic construct
  REGION 1..124: note = TAR2h-159 anti-TNFR1 dAb
EVQLLESGGGLVQPGGSLRLSCAASGFTFAGQDMRWVRQAPGKGLEWVSSIPSSGFNTYYADSVKGRFTISRDNSKNTLYLQMNSLRAEDTAVYYCAKRAKDRSVSQMPYFDYWGQGTLVTVSS

SEQ ID NO: 258 - protein, 120 aa, synthetic construct
  REGION 1..120: note = TAR2h-165 anti-TNFR1 dAb
EVQLLESGGGLVQPGGSLRLSCAASGFTFMRPDMVWVRQAPGKGLEWVSTIKDWGDQTYYADSVKGRFTISRDNSKNTLYLQMNSLRAEDAAVYYCAKADSRAQLDFDYWGQGTLVTVSS

SEQ ID NO: 259 - protein, 121 aa, synthetic construct
  REGION 1..121: note = TAR2h-166 anti-TNFR1 dAb
EVQLLESGGGLVQPGGSLRLSCAASGFTFSSYAMSWVRQAPGKGLEWVSAISGSGGSTYYADSVKGRFTISRDNSKNTLYLQMNSLRAEDTAVYYCAKPYFLFRATSFDYWGQGTLVTVSS

SEQ ID NO: 260 - protein, 120 aa, synthetic construct
  REGION 1..120: note = TAR2h-168 anti-TNFR1 dAb
EVQLLESGGGLVQPGGSLRLSCAASGFTFHDDDMVWVRQAPGKGLEWVSSIPGNGYVTYYADSVKGRFTISRDNSKNTLYLQMNSLRAEDTAVYYCAKRPDPTSVFFDYWGQGTLVTVSS

SEQ ID NO: 261 - protein, 116 aa, synthetic construct
  REGION 1..116: note = TAR2h-171 anti-TNFR1 dAb
EVQLLESGGGLVQPGGSLRLSCAASGFTFGDDWMTWVRQAPGKGLEWVSGIAAYGISTYYADSVKGRFTISRDNSKNTLYLQMNSLRAEDAAVYYCAESGKVFDYWGQGTLVTVSS

SEQ ID NO: 262 - protein, 120 aa, synthetic construct
  REGION 1..120: note = TAR2h-172 anti-TNFR1 dAb
EVQLLESGGGLVQPGGSLRLSCAASGFTFVERPMDWVRQAPGKGLEWVSLIGADGLSTYYADSVKGRFTISRDNSKNTLYLQMNSLRAEDTAVYYCAKLFRPGLLWFDYWGQGTLVTVSS

SEQ ID NO: 263 - protein, 119 aa, synthetic construct
  REGION 1..119: note = TAR2h-173 anti-TNFR1 dAb
EVQLLESGGGLVQPGGSLRLSCAASGFTFTGQDMQWVRQAPGKGLEWVSGINADGMATYYADSVKGRFTISRDNSKNTLYLQMNSLRAEDTAVYYCAKTSPTMRSFDYWGQGTLVTVSS

SEQ ID NO: 264 - protein, 118 aa, synthetic construct
  REGION 1..118: note = TAR2h-174 anti-TNFR1 dAb
EVQLLESGGGLVQPGGSLRLSCAASGFTFGEEYMQWVRQAPGKGLEWVSLIPHTGNPTYYADSVKGRFTISRDNSKNTLYLQMNSLRAEDTAVYYCAKLANSLLFDYWGQGTLVTVSS

SEQ ID NO: 265 - protein, 120 aa, synthetic construct
  REGION 1..120: note = TAR2h-176 anti-TNFR1 dAb
EVQLLESGGGLVQPGGSLRLSCAASGFTFHRCKMGWVRQAPGKGLEWVSFIEYDGRDTYYADSVKGRFTISRDNSKNTLYLQMNSLRAEDTAVYYCAKECTRPYGMFDYWGQGTLVTVSS

SEQ ID NO: 266 - protein, 120 aa, synthetic construct
  REGION 1..120: note = TAR2h-178 anti-TNFR1 dAb
EVQLLESGGGLVQPGGSLRLSCAASGFTFNRYSMGWLRQAPGKGLEWVSFIDKVGHHTWYEDPVKGRFTISRDNSKNTLYLQMNSLRAEDTAVYYCAKISQFGPNAFDYWGQGTQVTVSS

SEQ ID NO: 267 - protein, 120 aa, synthetic construct
  REGION 1..120: note = TAR2h-201 anti-TNFR1 dAb
  VARIANT 101: note = Xaa = Any Amino Acid
EVQLLESGGGLVQPGGSLRLSCAASGFTFTRYSMGWVRQAPGKGLEWVSMIAHAGPERYYADSVKGRFTISRDNSKNTLYLQMNSLRAEDTAVYYCAKISXFGSNAFDYWGQGTLVTVSS

SEQ ID NO: 268 - protein, 120 aa, synthetic construct
  REGION 1..120: note = TAR2h-202 anti-TNFR1 dAb
EVQLLESGGGLVQPGGSLRLSCAASGFTFTRYNMGWVRQAPGKGLEWVSFIDPPSVHTYYADSVKGRFTISRDNSKNTLYLQMNSLRAEDTAVYYCANISQFGSNAFDYWGQGTLVTVSS

SEQ ID NO: 269 - protein, 120 aa, synthetic construct
  REGION 1..120: note = TAR2h-203 anti-TNFR1 dAb
  VARIANT 96: note = Xaa = Any Amino Acid
EVQLLESGGGLVQPGGSLRLSCAASGFTFTRYSMGWVRQAPGKGLEWVSFIDPPSVHTYYADSVKGRFTISRDNSKNTLYLQMNSLRAEDTAVYYXAEISQFGSNAFDYWGQGTLVTVSS

SEQ ID NO: 270 - protein, 120 aa, synthetic construct
  REGION 1..120: note = TAR2h-204 anti-TNFR1 dAb
EVQLFESGGGLVQPGGSLRLSCAASGFTFTRYSMGWVRQAPGKGLEWVSMIAHAGPETYYADSVKGRFTISRDNSKNTLYLQMNSLRAEDTAVYYCAKISQFGSNALDYWGRGTLVTVSS

SEQ ID NO: 271 - protein, 122 aa, synthetic construct
  REGION 1..122: note = TAR2h-185-25 anti-TNFR1 dAb
EVQLLESGGGLVQPGGSLRLSCAASGFTFARYNMGWVRQAPGKGLEWVSLIDPSGGHTYYADSVKGRFTISRNNSKNTLYLQMNSLRAEDTAVYYCGKPVFSDWPAVEFDYWGQGTVVTVSS

SEQ ID NO: 272 - protein, 119 aa, synthetic construct
  REGION 1..119: note = TAR2h-154-10 anti-TNFR1 dAb
EVQLLESGGGMVQPGGSLRLSCAASGFTFEHEGMVWVRQAPGKGLEWVSHIGEDGQSTYYADSVKGRFTISRDNSKNTLYLQMNSLRAEDTAVYYCANIPKAGPSFDYWGQGTLVTVSS

SEQ ID NO: 273 - protein, 119 aa, synthetic construct
  REGION 1..119: note = TAR2h-205 anti-TNFR1 dAb
EVQLLESGGGLVQPGGSLRLSCAASGFTFVKYSMGWVRQAPGKGLEWVSQISNTGGHTYYADSVKGRFTISRDNSKNTLYLQMNSLRAEDTAVYYCAKYTGRWEPFDYWGQGTLVTVSS

SEQ ID NO: 274 - protein, 119 aa, synthetic construct
  REGION 1..119: note = TAR2h-5d1 anti-TNFR1 dAb
EVQLLESGGGLVQPGGSLRLSCAASGFTFPVYMMGWVRQAPGKGLEWVSSIDALGGRTGYADSVKGRFTISRDNSKNTLYLQMNSLRAEDTAVYYCAKTMSNKTHTFDYWGQGTLVTVS

SEQ ID NO: 275 - protein, 114 aa, synthetic construct
  REGION 1..114: note = TAR2h-5d2 anti-TNFR1 dAb
EVQLLESGGGLVQPGGSLRLSCAASGFTFVAYNMTWVRQAPGKGLEWVSSINTFGNTRYADSVKGRFTISRDNSKNTLYLQMNSLRAEDTAVYYCAKGSRPFDYWGQGTLVTVS

SEQ ID NO: 276 - protein, 118 aa, synthetic construct
  REGION 1..118: note = TAR2h-5d3 anti-TNFR1 dAb
EVQLLESGGGLVQPGGSLRLSCAASGFTFGYRMGWVRQAPGKGLEWVSWITRTGGTTQYADSVKGRFTISRDNSKNTLYLQMNSLRAEDTAVYYCAKPAKLVGVGFDYWGQGTLVTVS

SEQ ID NO: 277 - protein, 118 aa, synthetic construct
  REGION 1..118: note = TAR2h-5d4 anti-TNFR1 dAb
EVQLLESGGGLVQPGGSLRLSCAASGFTFRKYMGWVRQAPGKGLEWVSQIGAKGQSTDYADSVKGRFTISRDNSKNTLYLQMNSLRAEDTAVYYCAKKKRGENYFFDYWGQGTLVTVS

SEQ ID NO: 278 - protein, 119 aa, synthetic construct
  REGION 1..119: note = TAR2h-5d5 anti-TNFR1 dAb
EVQLLESGGGLVQPGGSLRLSCAASGFTFRRYSMSWVRQAPGKGLEWVSDISRSGRYTHYADSVKGRFTISRDNSKNTLYLQMNSLRAEDTAVYYCAKRIDSSQNGFDYWGQGTLVTVS

SEQ ID NO: 279 - protein, 114 aa, synthetic construct
  REGION 1..114: note = TAR2h-5d6 anti-TNFR1 dAb
EVQLLESGGGLVQPGGSLRLSCAASGFTFGYKMFWVRQAPGKGLEWVSAISGSGGSTYYADSVKGRFTISRDNSKNTLYLQMNSLRAEDTAVYYCAKQKENFDYWGQGTLVTVS

SEQ ID NO: 280 - protein, 119 aa, synthetic construct
  REGION 1..119: note = TAR2h-5d7 anti-TNFR1 dAb
EVQLLESGGGLVQPGGSLRLSCAASGFTFGDYAMWWVRQAPGKGLEWVSVISSNGGSTFYADSVKGRFTISRDNSKNTLYLQMNSLRAEDTAVYYCAKRVRKRTPEFDYWGQGTLVTVS

SEQ ID NO: 281 - protein, 119 aa, synthetic construct
  REGION 1..119: note = TAR2h-5d8 anti-TNFR1 dAb
EVQLLESGGGLVQPGGSLRLSCAASGFTFRRYKMGWVRQAPGKGLEWVSAIGRNGTKTNYADSVKGRFTISRDNSKNTLYLQMNSLRAEDTAVYYCAKIYTGKPAAFDYWGQGTLVTVS

SEQ ID NO: 282 - protein, 118 aa, synthetic construct
  REGION 1..118: note = TAR2h-5d9 anti-TNFR1 dAb
EVQLLESGGGLVQPGGSLRLSCAASGFTFKKYMSWVRQAPGKGLEWVSAISGSGGSTYYADSVKGRFTISRDNSKNTLYLQMNSLRAEDTAVYYCAKMLRTKNKVFDYWGQGTLVTVS

SEQ ID NO: 283 - protein, 119 aa, synthetic construct; identical to SEQ ID NO: 281
  REGION 1..119: note = TAR2h-5d10 anti-TNFR1 dAb

SEQ ID NO: 284 - protein, 118 aa, synthetic construct
  REGION 1..118: note = TAR2h-5d11 anti-TNFR1 dAb
EVQLLESGGGLVQPGGSLRLSCAASGFTFSYRMGWVRQAPGKGLEWVSSISSRGRHTSYADSVKGRFTISRDNSKNTLYLQMNSLRAEDTAVYYCAKRVPGRGRSFDYWGQGTLVTVS

SEQ ID NO: 285 - protein, 119 aa, synthetic construct
  REGION 1..119: note = TAR2h-5d12 anti-TNFR1 dAb
EVQLLESGGGLVQPGGSLRLSCAASGFPFRRYRMRWVRQAPGKGLEWVSGISPGGKHTTYADSVKGRFTISRDNSKNTLYLQMNSLRAEDTAVYYCAKGEGGASSAFDYWGQGTLVTVS

SEQ ID NO: 286 - protein, 118 aa, synthetic construct
  REGION 1..118: note = TAR2h-5d13 anti-TNFR1 dAb
EVQLLESGGGLVQPGGSLRLSCAASGFTFRYGMVWVRQAPGKGLEWVSAISGSGGSTYYADSVKGRFTISRDNSKNTLYLQMNSLRAEDTAVYYCAKRHSSEARQFDYWGQGTLVTVS

SEQ ID NO: 287 - protein, 118 aa, synthetic construct
  REGION 1..118: note = TAR2h-5d1 variant anti-TNFR1 dAb
EVQLLESGGGLVQPGGSLRLSCAASGFTFPVYMMGWVRQAPGKGLEWVSSIDALGGRTGYADSVKGRFTISRDNSKNTLYLQMNSLRAEDTAVYYCAKTMSNKTHTFDYWGQGTLVTS

SEQ ID NO: 288 - protein, 115 aa, synthetic construct
  REGION 1..115: note = TAR2h-5d2 variant anti-TNFR1 dAb
  VARIANT 57: note = Xaa = Any Amino Acid
EVQLLESGGGLVQPGGSLRLSCAASGFTFVAYNMTWVRQAPGKGLEWVSSINTFGNXTRYADSVKGRFTISRDNSKNTLYLQMNSLRAEDTAVYYCAKGSRPFDYWGQGTLVTVS

SEQ ID NO: 289 - protein, 119 aa, synthetic construct
  REGION 1..119: note = TAR2h-5d3 variant anti-TNFR1 dAb
  VARIANT 30: note = Xaa = Any Amino Acid
EVQLLESGGGLVQPGGSLRLSCAASGFTFXGYRMGWVRQAPGKGLEWVSWITRTGGTTQYADSVKGRFTISRDNSKNTLYLQMNSLRAEDTAVYYCAKPAKLVGVGFDYWGQGTLVTVS

SEQ ID NO: 290 - protein, 119 aa, synthetic construct
  REGION 1..119: note = TAR2h-5d4 variant anti-TNFR1 dAb
  VARIANT 33: note = Xaa = Any Amino Acid
EVQLLESGGGLVQPGGSLRLSCAASGFTFRKYXMGWVRQAPGKGLEWVSQIGAKGQSTDYADSVKGRFTISRDNSKNTLYLQMNSLRAEDTAVYYCAKKKRGENYFFDYWGQGTLVTVS

SEQ ID NO: 291 - protein, 115 aa, synthetic construct
  REGION 1..115: note = TAR2h-5d6 variant anti-TNFR1 dAb
  VARIANT 30: note = Xaa = Any Amino Acid
EVQLLESGGGLVQPGGSLRLSCAASGFTFXGYKMFWVRQAPGKGLEWVSAISGSGGSTYYADSVKGRFTISRDNSKNTLYLQMNSLRAEDTAVYYCAKQKENFDYWGQGTLVTVS

SEQ ID NO: 292 - protein, 119 aa, synthetic construct
  REGION 1..119: note = TAR2h-5d9 variant anti-TNFR1 dAb
  VARIANT 33: note = Xaa = Any Amino Acid
EVQLLESGGGLVQPGGSLRLSCAASGFTFKKYXMSWVRQAPGKGLEWVSAISGSGGSTYYADSVKGRFTISRDNSKNTLYLQMNSLRAEDTAVYYCAKMLRTKNKVFDYWGQGTLVTVS

SEQ ID NO: 293 - protein, 119 aa, synthetic construct
  REGION 1..119: note = TAR2h-5d11 variant anti-TNFR1 dAb
  VARIANT 30: note = Xaa = Any Amino Acid
EVQLLESGGGLVQPGGSLRLSCAASGFTFXSYRMGWVRQAPGKGLEWVSSISSRGRHTSYADSVKGRFTISRDNSKNTLYLQMNSLRAEDTAVYYCAKRVPGRGRSFDYWGQGTLVTVS

SEQ ID NO: 294 - protein, 119 aa, synthetic construct
  REGION 1..119: note = TAR2h-5d13 variant anti-TNFR1 dAb
  VARIANT 30: note = Xaa = Any Amino Acid
EVQLLESGGGLVQPGGSLRLSCAASGFTFXRYGMVWVRQAPGKGLEWVSAISGSGGSTYYADSVKGRFTISRDNSKNTLYLQMNSLRAEDTAVYYCAKRHSSEARQFDYWGQGTLVTVS

SEQ ID NO: 295 - protein, 119 aa, synthetic construct
  REGION 1..119: note = Tar2h-131-1 anti-TNFR1 dAb
EVQLLESGGGLVQPGGSLRLSCAASGFTFAHEPMVWVRQAPGKGLEWVSHIDRVGQDTYYADSVKGRFIISRDNSKNTLYLQMYSLRAEDTAVYYCAILPKRGPRFDYWGQGTLVTVSS

SEQ ID NO: 296 - protein, 119 aa, synthetic construct
  REGION 1..119: note = Tar2h-131-2 anti-TNFR1 dAb
EVQLLESGGGLVQPGGSLRLSCAASGFTFAHEPMVWVRQAPGKGLEWVSHIDRVGQDTYYADSVKGRFTISRDNSKNTLYLQMNSLRAEDTAVYYCARLPKRGPRFDYWGHGTLVTVSS

SEQ ID NO: 297 - protein, 119 aa, synthetic construct
  REGION 1..119: note = Tar2h-131-3 anti-TNFR1 dAb
EVQLLESGGGLVQPGGSLRLSCAASGFTFAHEPMVWVRQAPGKGLEWVSHIDRVGQDTYYADSVKGRFTISRDNSKNTLYLQMNSLRAEDTAVYYCAILPKRGPRFDYWGQGTLVTVSS

SEQ ID NO: 298 - protein, 119 aa, synthetic construct
  REGION 1..119: note = Tar2h-131-4 anti-TNFR1 dAb
EVQLLESGGGLVQPGGSLRLSCTASGFTFAHEPMVWVRQAPGKGLEWVSHIDRVGQDTYYADSVKGRFTISRDNSKNTLYLQMNSLRAEDTAVYYCARLPKRGPRFDYWGLGTLVTVSS

SEQ ID NO: 299 - protein, 119 aa, synthetic construct
  REGION 1..119: note = Tar2h-131-5 anti-TNFR1 dAb
EVKLLESGGGLVQPGGSLRLSCAASGFTFAHEPMVWIRQAPGKGLEWVSHIDRVGQDTYYADSVKGRYTISRDNSKNTLYLQMNSLRAEDTAVYYCARLPKRGPRFDYWGQGTLVTVSS

SEQ ID NO: 300 - protein, 119 aa, synthetic construct
  REGION 1..119: note = Tar2h-131-6 anti-TNFR1 dAb
EVQLLESGGGLVQPGGSLRLSCAASGFTFAHEPMVWVRQAPGKGLEWVSHIDRVGQDTYYADSVKGRFTISRDNSKNTLYLQMNSLRAEDTAVYYCARLPKRGPRFDYWGLGTLVTVSS

SEQ ID NO: 301 - protein, 119 aa, synthetic construct
  REGION 1..119: note = Tar2h-131-7 anti-TNFR1 dAb
EVQLLESGGGLVQPGGSLRLSCAASGFTFAHEPMVWVRQAPGKGLEWVSHIDRAGQDTYYADSVKGRFTISRDNSKNTLYLQMNSLRAEDTAVYYCARLPKRGPRFDYWGLGTLVTVSS

SEQ ID NO: 302 - protein, 119 aa, synthetic construct
  REGION 1..119: note = Tar2h-131-9 anti-TNFR1 dAb
EVQLLESGGGLVRPGGSLRLSCAASGFTFAHEPMVWVRQAPGKGLEWVSHIDRVGQDTYYADSVKGRFTISRDNSKNTLYLQMNSLRAEDTAVYYCARLPKRGPRFDYWGLGTLVTVSS

SEQ ID NO: 303 - protein, 119 aa, synthetic construct
  REGION 1..119: note = Tar2h-131-10 anti-TNFR1 dAb
EVQLLESGGGLVQPGGSLRLSCAASGFTFAHEPMVWVRQAPGKGLEWVSHIDRVGQDTYYADSVKGRFTISRDNSKNTLYLQMNSLRAEDTAIYYCARLPKRGPRFDYWGLGTLVTVSS

SEQ ID NO: 304 - protein, 119 aa, synthetic construct
  REGION 1..119: note = Tar2h-131-11 anti-TNFR1 dAb
EVQLLESGGGLVQPGGSLRLSCAASGFTFAHEPMVWVRQAPGKGLEWVSHIDRVGQDPYYADSVKGRFTISRDNSKNTLYLQMNSLRAEDTAVYYCARLPKRGPRFDYWGQGTLVTVSS

SEQ ID NO: 305 - protein, 119 aa, synthetic construct
  REGION 1..119: note = Tar2h-131-12 anti-TNFR1 dAb
EVQLLESGGGLVQPGGSLRLSCAASGFTFAHEPMVWIRQAPGKGLEWVSHIDRVGQDTYYADSVKGRFTISRDNSKNTLYLQMNSLRAEDTAVYYCAILPKRGPRFDYWGQGTLVTVSS

SEQ ID NO: 306 - protein, 119 aa, synthetic construct
  REGION 1..119: note = Tar2h-131-13 anti-TNFR1 dAb
EVQLLESGGGLVQPGGSLRLSCAASGFTFAHEPMVWVRQAPGKGLEWVSHIDRVGQDPYYADSVKGRFTISRDNSKNTLYLQMNSLRAEDTAVYYCARLPKRGPRFDYWGLGTLVTVSS

SEQ ID NO: 307 - protein, 119 aa, synthetic construct
  REGION 1..119: note = Tar2h-131-14 anti-TNFR1 dAb
EVQLLESGGGLVQPGGSLRLSCAASGFTFAHEPMVWVRQAPGKGLEWVSHIDRVGQDAYYADSVKGRFTISRDNSKNTLYLQMNSLRAEDTAVYYCAILPKRGPRFDYWGQGTLVTVSS

SEQ ID NO: 308 - protein, 119 aa, synthetic construct
  REGION 1..119: note = Tar2h-131-15 anti-TNFR1 dAb
EVQLLESGGGLVQPGGSLRLSCAASGFTFAHEPMVWVRQAPGKGLEWVSHIDRVGQDTYYADSVKGRSTISRDNSKNTLYLQMNSLRAEDTAIYYCARLPKRGPRFDYWGLGTLVTVSS

SEQ ID NO: 309 - protein, 119 aa, synthetic construct
  REGION 1..119: note = Tar2h-131-16 anti-TNFR1 dAb
EVQLLESGGGLVQPGGSLRLSCAASGFTFAHEPMVWVRQAPGKGLEWVSHIDRVGQDTYYADSVKGRFTISRDNSKNTLYLQMNSLRAEDTAIYYCARPPKRGPRFDYWGLGTLVTVSS

SEQ ID NO: 310 - protein, 119 aa, synthetic construct
  REGION 1..119: note = Tar2h-131-17 anti-TNFR1 dAb
EVQLLESGGGLVQPGGSLRLSCAASGFTFAHEPMVWVRQAPGKGLEWVSHIDRVGQDTYYADSVKGRFTISRDNSKNTLYLQMNSLRAKDTAIYYCARLPKRGPRFDYWGLGTLVTVSS

SEQ ID NO: 311 - protein, 119 aa, synthetic construct
  REGION 1..119: note = Tar2h-131-18 anti-TNFR1 dAb
EVQLLESGGGLVQPGGSLRLSCAASGFTFAHEPMVWVRQAPGKGLEWVSHIDRVGQDTYYADSAKGRFTISRDNSKNTLYLQMNSLRAEDTAIYYCARLPKRGPRFDYWGLGTLVTVSS

SEQ ID NO: 312 - protein, 119 aa, synthetic construct
  REGION 1..119: note = Tar2h-131-19 anti-TNFR1 dAb
EVQLLESGGGLVQPGGSLRLSCAASGFTFAHEPMVWVRQAPGKGLEWVSHIDRVGQDTYYADSVKGRFTISRDNSKNTLYPQMNSLRAEDTAIYYCARLPKRGPRFDYWGLGTLVTVSS

SEQ ID NO: 313 - protein, 119 aa, synthetic construct
  REGION 1..119: note = Tar2h-131-20 anti-TNFR1 dAb
EVQLLESGGGLVQPGGSLRLSCAASGFTFAHEPMVWVRQAPGKGLEWVSHIDRVGQDTYYADSVKGRFTVSRDNSKNTLYLQMNSLRAEDTAIYYCARLPKRGPRFDYWGLGTLVTVSS

SEQ ID NO: 314 - protein, 119 aa, synthetic construct
  REGION 1..119: note = Tar2h-131-21 anti-TNFR1 dAb
EVQLLESGGGLVQPGGSLRLSCAASGFTFAHEPMVWVRQAPGKGLEWVSHIDRVGQDTYYADSVKGRFIISRDNSKNTLYLQMYSLRAEDTAVYYCAMLPKRGPRFGYWGQGTLVTVSS

SEQ ID NO: 315 - protein, 119 aa, synthetic construct
  REGION 1..119: note = Tar2h-131-22 anti-TNFR1 dAb
EVQLLESGGGLVQPGGSLRLSCAASGFTFAHEPMVWVRQAPGKGLEWVSHIDRVGQDTYYADSVKGRFTISRDNSKNTLYLQMNSLCAEDTAIYYCARLPKRGPRFDYWGLGTLVTVSS

SEQ ID NO: 316 - protein, 119 aa, synthetic construct
  REGION 1..119: note = Tar2h-131-23 anti-TNFR1 dAb
EVQLLESGGGLIQPGGSLRLSCAASGFTFAHETMVWVRQAPGKGLEWVSHIDRVGQDTYYADSVKGRFTISRDNSKNTLYLQMNSLRAEDTAVYYCAGLPKRGPWFDYRGQGTLVTVSS

SEQ ID NO: 317 - protein, 119 aa, synthetic construct
  REGION 1..119: note = Tar2h-131-25 anti-TNFR1 dAb
EVQLLESGGGLIQPGGSLRLSCAASGFTFAHETMVWVRQAPGKGLEWVSHIDRVGQDTYYADSVKGRFTISRDNSKNTLYLQMNSLRAEDTAVYYCAQLPKRGPWFDYRGQGTLVTVSS

SEQ ID NO: 318 - protein, 119 aa, synthetic construct
  REGION 1..119: note = Tar2h-131-26 anti-TNFR1 dAb
EVQLLESGGGLIQPGGSLRLSCAASGFTFAHETMVWVRQAPGKGLEWVSHIDRVGQDTYYADSVKGRFTISRDNSKNTLYLQMNSLRVEDTAVYYCASLPKRGPWFDYRGQGTLVTVSS

SEQ ID NO: 319 - protein, 119 aa, synthetic construct
  REGION 1..119: note = Tar2h-131-27 anti-TNFR1 dAb
EVQLLESGGGLYQPGGSLRLSCAASGFTFAHETMVWVRQAPGKGLEWVSHIDRVGQDTYYADSVKGRFTISRDNSKNTLYLQMNSLRAEDTAVYYCAKLPKRGPWFDYRGQGTLVTVSS

SEQ ID NO: 320 - protein, 119 aa, synthetic construct
  REGION 1..119: note = Tar2h-131-28 anti-TNFR1 dAb
EVQLLESGGGLGQPGGSLRLSCAASGFTFAHETMVWVRQAPGKGLEWVSHIDRVGQDTYYADSVKGRFTISRDNSKNTLYLQMNSLRAEDTAVYYCAKLPKRGPWFDYRGQGTLVTVSS

SEQ ID NO: 321 - protein, 119 aa, synthetic construct
  REGION 1..119: note = Tar2h-131-29 anti-TNFR1 dAb
  VARIANT 12: note = Xaa = Any Amino Acid
EGQLLESGGGLXQPGGSLLLSCAASGFTFAHETMVWVRQAPGKGLEWVSHIDRVGQDTYYADSVKGRFTISRDNSKNTLYLQMNSLRAEDTAVYYCAKLPKRGPWFDYRGQGTLVTVSS

SEQ ID NO: 322 - protein, 119 aa, synthetic construct
  REGION 1..119: note = Tar2h-131-30 anti-TNFR1 dAb
EVQLLESGGGLVQPGGSLRLSCAASGFTFAHETMVWVRQAPGKGLEWVSHIDRVGQDTYYADSVKGRFTISRDNSKNTLYLQMNSLRAEDTAVYYCAKLPKRGPWFDYRGQGTLVTVSS

SEQ ID NO: 323 - protein, 119 aa, synthetic construct
  REGION 1..119: note = Tar2h-131-31 anti-TNFR1 dAb
EVQLLESGGGLIQPGGSLRLSCAASGFTFAHETMVWVRQAPGKGLEWVSHIDRVGQDPYYADSVKGRFTISRDNSKNTLYLQMNSLRAEDTAVYYCAKLPKRGPWFDYRGQGTLVTVSS

SEQ ID NO: 324 - protein, 119 aa, synthetic construct
  REGION 1..119: note = Tar2h-131-32 anti-TNFR1 dAb
EGQLLESGGGLIQPGGSLRLSCGASGFTFAHETMVWVRQAPGKGLEWVSHIDRVGQDPYYADSVKGRFTISRDNSKNTLYLQMNSLRAEDTAVYYCAKLPKRGPWFDYRGQGTLVTVSS

SEQ ID NO: 325 - protein, 119 aa, synthetic construct
  REGION 1..119: note = Tar2h-131-33 anti-TNFR1 dAb
EVQLLESGGGLIQPGGSLRLSCAASGFTFAHETMVWVRQAPGKGLEWVSHIDRVGQDNYYADSVKGRFTISRDNSKNTLYLQMNSLRAEDTAVYYCAKLPKRGPWFDYRGQGTLVTVSS

SEQ ID NO: 326 - protein, 119 aa, synthetic construct
  REGION 1..119: note = Tar2h-131-34 anti-TNFR1 dAb
EVQLLESGGGLIQPGGSLRLSCAASGFTFAHETMVWVRQAPGKGLEWVSHIDRVGQDTYYADSVKGRFTISRDNSKNTLYLQMNSLRAEDTAVYYCAKLPKRGPGFDYRGQGTLVTVSS

SEQ ID NO: 327 - protein, 119 aa, synthetic construct
  REGION 1..119: note = Tar2h-131-35 anti-TNFR1 dAb
EVQLLESGGGLIQPGGSLRLSCAASGFTFAHETMVWVRQAPGKGLEWVSHIDRVGQDTYYADSVKGRFTISRDNSKNTLYLQMNSLRAEDTAVYYCAKLPKRGPVFDYRGQGTLVTVSS

SEQ ID NO: 328 - protein, 119 aa, synthetic construct
  REGION 1..119: note = Tar2h-131-36 anti-TNFR1 dAb
EVQLLESGGGLIQPGGSLRLSCAASGFTFAHETMVWVRQAPGKGLEWVSHIDRVGQDTYYADSVKGRFTISRDNSKNTLYLQMNSLRAEDTAVYYCAKLPKRGPWFDYYGQGTLVTVSS

SEQ ID NO: 329 - protein, 119 aa, synthetic construct
  REGION 1..119: note = Tar2h-131-37 anti-TNFR1 dAb
EGQLLESGGGLIQPGGSLLLSCAPSGFTFAHETMVWVRQAPGKGLEWVSHIDRVGQDTYYADSVKGRFTISRDNSKNTLYLQMNSLRAEDTAVYYCAKLPKRGPWFDYKGQGTLVTVSS

SEQ ID NO: 330 - protein, 119 aa, synthetic construct
  REGION 1..119: note = Tar2h-131-38 anti-TNFR1 dAb
EVQLLESGGGLIQPGGSLRLSCAASGFTFAHETMVWVRQAPGKGLEWVSHIDRVGQDTYYADSVKGRFTISRDNSKNTLYLQMNSLRAEDTAVYYCAKLPKRGPWFDYVGQGTLVTVSS

SEQ ID NO: 331 - protein, 119 aa, synthetic construct
  REGION 1..119: note = Tar2h-131-39 anti-TNFR1 dAb
EVQLLESGGGLIQPGGSLRLSCAASGFTFAHETMVWVRQAPGKGLEWVSHIDRVGQDTYYADSVKGRFTISRDNSKNTLYLQMNSLRAEDTAVYYCAKLPKRGPWFDYLGQGTLVTVSS

SEQ ID NO: 332 - protein, 119 aa, synthetic construct
  REGION 1..119: note = Tar2h-131-40 anti-TNFR1 dAb
EVQLLESGGGLVQPGGSLRLSCAASGFTFAHEPMVWVRQAPGKGLEWVSHIDRVGQDTYYADSVKGRFTISRDNSKNTLYLQMNSLRAEDTAVYYCASLPKRGPRFDYWGQGTLVTVSS

SEQ ID NO: 333 - protein, 119 aa, synthetic construct
  REGION 1..119: note = Tar2h-131-41 anti-TNFR1 dAb
EVQLLESGGGLVQPGGSLRLSCAASGFTFAHEPMVWVRQAPGKGLEWVSHIDRVGQDTYYADSVKGRFTISRDNSKNTLYLQMNSLRAEDTAVYYCAGLPKRGPRFDYWGQGTLVTVSS

SEQ ID NO: 334 - protein, 119 aa, synthetic construct
  REGION 1..119: note = Tar2h-131-42 anti-TNFR1 dAb
EVQLLESGGGLVQPGGSLRLSCAASGFTFAHEPMVWVRQAPGKGLEWVSHIDRVGQDTYYADSVKGRFTISRDNSKNTLYLQMNSLRAEDTAVYYCARLPKRGPRFDYWGQGTLVTVSS

SEQ ID NO: 335 - protein, 119 aa, synthetic construct
  REGION 1..119: note = Tar2h-131-43 anti-TNFR1 dAb
EVQLLESGGGLVQPGGSLRLSCAASGFTFAHEPMVWVRQAPGKGLGWVSHIDRVGQDTYYADSVKGRFTISRDNSKNTLYLQMNSLRAEDTAVYYCAPLPKRGPRFDYWGQGTLVTVSS

SEQ ID NO: 336 - protein, 119 aa, synthetic construct; identical to SEQ ID NO: 297
  REGION 1..119: note = Tar2h-131-44 anti-TNFR1 dAb

SEQ ID NO: 337 - protein, 119 aa, synthetic construct
  REGION 1..119: note = Tar2h-131-45 anti-TNFR1 dAb
EVQLLESGGGLVQPGGSLRLSCAASGFTFAHEPMVWIRQAPGKGLEWVSHIDRVGQDTYYADSVKGRFTISRDNSKNTLYLQMNSLRAEDTAVYYCAMLPKRGPRFDYWGQGTLVTVSS

SEQ ID NO: 338 - protein, 119 aa, synthetic construct
  REGION 1..119: note = Tar2h-131-46 anti-TNFR1 dAb
EVQLLESGGGLVQPGGSLRLSCAASGFTFAHEPMVWVRQAPGKGLEWVSHIDRVGQDTYYADSVKGRFTISRDNSKNTLYLQMNSLRAEDTAVYYCALLPKRGPRFDYWGQGTLVTVSS

SEQ ID NO: 339 - protein, 119 aa, synthetic construct
  REGION 1..119: note = Tar2h-131-47 anti-TNFR1 dAb
  VARIANT 32: note = Xaa = Any Amino Acid
EVQLLESGGGLIQPGGSLRLSCAASGFTFAHXTMVWVRQAPGKGLEWVSHIDRVGQDKYYADSVKGRFTISRDNSKNTLYLQMNSLRAEDTAVYYCAKLPKRGPWFDYRGQGTLVTVSS

SEQ ID NO: 340 - protein, 119 aa, synthetic construct
  REGION 1..119: note = Tar2h-131-48 anti-TNFR1 dAb
  VARIANT 32: note = Xaa = Any Amino Acid
EVQLLESGGGLIQPGGSLRLSCAASGFTFAHXTMVWVRQAPGKGLEWVSHIDRVGQDTYYADSVKGRFTISRDNSKNTLYLQMNSLRAEDTAVYYCAKLPKRGPWFDYIGQGTLVTVSS

SEQ ID NO: 341 - protein, 119 aa, synthetic construct
  REGION 1..119: note = Tar2h-131-49 anti-TNFR1 dAb
EVQLLESGGGLIQPGGSLRLSCAASGFTFAHETMVWVRQAPGKGLEWVSHIDRVGQDTYYADSVKGRFTISRDNSKNTLYLQMNSLRAEDTAVYYCAKLPKRGPWFDYNGQGTLVTVSS

SEQ ID NO: 342 - protein, 119 aa, synthetic construct
  REGION 1..119: note = Tar2h-131-50 anti-TNFR1 dAb
EVQLLESGGGLIQPGGSLRLSCAASGFTFAHEVMVWVRQAPGKGLEWVSHIDRVGQDTYYADSVKGRFTISRDNSKNTLYLQMNSLRAEDTAVYYCAKLPKRGPWFDYRGQGTLVTVSS

SEQ ID NO: 343 - protein, 119 aa, synthetic construct
  REGION 1..119: note = Tar2h-131-51 anti-TNFR1 dAb
EVQLLESGGGLIQPGGSLRLSCAASGFTFAHELMVWVRQAPGKGLEWVSHIDRVGQDTYYADSVKGRFTISRDNSKNTLYLQMNSLRAEDTAVYYCAKLPKRGPWFDYRGQGTLVTVSS

SEQ ID NO: 344 - protein, 119 aa, synthetic construct
  REGION 1..119: note = Tar2h-131-52 anti-TNFR1 dAb
EVQLLESGGNLVQPGGSLRLSCAASGFTFAHETMVWVRQAPGKGLEWVSHIDRVGQDTYYADSVKGRFTISRDNSKNTLYLQMNSLRAEDTAVYYCAKLPKRGPWFDYRGQGTLVTVSS

SEQ ID NO: 345 - protein, 119 aa, synthetic construct; identical to SEQ ID NO: 322
  REGION 1..119: note = Tar2h-131-53 anti-TNFR1 dAb

SEQ ID NO: 346 - protein, 119 aa, synthetic construct
  REGION 1..119: note = Tar2h-131-54 anti-TNFR1 dAb
EVQLLESGGGLIQPGGSLRLSCAASGFTFAHKTMVWVRQAPGKGLEWVSHIDRVGQDTYYADSVKGRFTISRDNSKNTLYLQMNSLRAEDTAVYYCALLPKRGPWFDYRGQGTLVTVSS

SEQ ID NO: 347 - protein, 119 aa, synthetic construct
  REGION 1..119: note = Tar2h-131-55 anti-TNFR1 dAb
EVQLLESGGGLIQPGGSLRLSCAASGFTFAHETMVWVRQAPGKGLEWVSHIDRVGQDTYYADPVKGRFTISRDNSKNTLYLQMNSLRAEDTAVYYCARLPKRGPWFDYRGQGTLATVSS

SEQ ID NO: 348 - protein, 119 aa, synthetic construct
  REGION 1..119: note = Tar2h-131-56 anti-TNFR1 dAb
EVQLLESGGGLIQPGGSLRLSCAASGFTFAHETMVWVRQAPGKGLEWVSHIDRVGQDTYYADSVKGRFTISRDNSKNSLYLQMNSLRAEDTAVYYCAVLPKRGPWFDYRGQGTLVTVSS

SEQ ID NO: 349 - protein, 119 aa, synthetic construct
  REGION 1..119: note = Tar2h-131-57 anti-TNFR1 dAb
EVQLLESGGGLIQPGGSLRLSCAASGFTFAHETMVWVRQAPGKGLEWVSHIDRVGQDTYYADSVKGRFTISRDNPKNTLYLQMNSLRAEDTAVYYCARLPKRGPWFDYRGQGTLVTVSS

SEQ ID NO: 350 - protein, 119 aa, synthetic construct
  REGION 1..119: note = Tar2h-131-58 anti-TNFR1 dAb
EVQLLESGGGLIQPGGSLRLSCAASGFTFAHDTMVWVRQAPGKGLEWVSHIDRVGQDTYYADSVKGRFTISRDNSKNTLYLQMNSLRAEDTAVYYCARLPKRGPWFDYQGQGTLVTVSS

SEQ ID NO: 351 - protein, 119 aa, synthetic construct
  REGION 1..119: note = Tar2h-131-59 anti-TNFR1 dAb
EVQLLESGGGLIQPGGSLRLSCAASGFTFAHDTMVWVRQAPGKGLEWVSHIDRVGQDTYYADSVKDRFTISRDNSKNTLYLQMNSLRAEDTAVYYCAVLPKRGPWFDYRGQGTLVTVSS

SEQ ID NO: 352 - protein, 119 aa, synthetic construct
  REGION 1..119: note = Tar2h-131-60 anti-TNFR1 dAb
EVQLLESGGGLIQPGGSLRLSCAASGFTFAHETMVWVRQAPGKGLEWVSHIDRVGQDTYYADSVKGRFTISRDNSKNTLFLQMNSLRAEDTAVYYCARLPKRGPWFDYRGRGTLVTVSS

SEQ ID NO: 353 - protein, 119 aa, synthetic construct
  REGION 1..119: note = Tar2h-131-61 anti-TNFR1 dAb
EVQLLESGGGLIQPGGSLRLSCAASGFTFAHETMVWVRQAPGKGLEWVSHIDRVGQDTYYADSVEGRFTISRDNSKNTLYLQMNSLRAEDTAVYYCAVLPKRGPWFDYRGQGTLVTVSS

SEQ ID NO: 354 - protein, 119 aa, synthetic construct
  REGION 1..119: note = Tar2h-131-62 anti-TNFR1 dAb
EVQLLESGGGLIQPGGSLRLSCAASGFTFAHETMVWVRQAPGKGLEWVSHIDRVGQDTYYADSVEGRFTISRDNSKNTLYLQMNSLRAEDTAVYYCALLPKRGPWFDYRGQGTLVTVSS

SEQ ID NO: 355 - protein, 119 aa, synthetic construct
  REGION 1..119: note = Tar2h-131-63 anti-TNFR1 dAb
EVQLLESGGGLIQPGGSLRLSCAASGFTFAHETMVWVRQAPGKGQEWVSHIDRVGQDTYYADSVKGRFTISRDNSKNSLYLQMNSLRAEDTAVYYCAVLPKRGPWFDYRGQGTLVTVSS

SEQ ID NO: 356 - protein, 119 aa, synthetic construct
  REGION 1..119: note = Tar2h-131-64 anti-TNFR1 dAb
EVQLSESGGGLIQPGGSLRLSCVASGFTFAHETMVWVRQAPGKGLEWVSHIDRVGQDTYYADSVKGRFTISRDNSKNTLYLQMNSLRAEDTAVYYCAILPKRGPWFDYRGQGTLVTVSS

SEQ ID NO: 357 - protein, 119 aa, synthetic construct
  REGION 1..119: note = Tar2h-131-65 anti-TNFR1 dAb
EVQLLESGGGLIQPGGSLRLTCAASGFTFAHETMVWVRQAPGKGLEWVSHIDRVGQDTYYADSVKGRFTISRDNSKNTLYLQMNSLRAEDTAVYYCAVLPKRGPWFDYRGQGTLVTVSS

SEQ ID NO: 358 - protein, 119 aa, synthetic construct
  REGION 1..119: note = Tar2h-131-66 anti-TNFR1 dAb
EVQLLESGGGLIQPGGSLRLSCAASGFTFAHETMVWVRQAPGKGLEWVSHIDRVGQDTYYADSVKGRFTISRDNSMNTLYLQMNSLRAEDTAVYYCALLPKRGPWFDYRGQGTLVTVSS

SEQ ID NO: 359 - protein, 119 aa, synthetic construct
  REGION 1..119: note = Tar2h-131-67 anti-TNFR1 dAb
EVQLLESGGGSIQPGGSLRLSCAASGFTFAHETMVWVRQAPGKGLEWVSHIDRVGQDTYYADSVKGRFTISRDNSKNTLYLQMNSLRAEDTAVYYCAVLPKRGPWFDYRGQGTLVTVSS

SEQ ID NO: 360 - protein, 119 aa, synthetic construct
  REGION 1..119: note = Tar2h-131-68 anti-TNFR1 dAb
EVQLLESGGGLIQPGGSLRLSCAASGFTFAHETMVWVRQAPGKGLEWVSHIDRVGQDTYYADSVKGRFTISRNNSMNTLYLQMNSLRAEDTAVYYCAILPKRGPWFDYRGQGTLVTVSS

SEQ ID NO: 361 - protein, 119 aa, synthetic construct
  REGION 1..119: note = Tar2h-131-69 anti-TNFR1 dAb
EVQLLESGGGLIQPGGSLRLSCAASGFTFAHETMVWVRQAPGRGLEWVSHIDRVGQDTYYADSVKGRFTISRDNSKNTLYLQMNSLRAEDTAVYYCAVLPKRGPWFDYRGQGTLVTVSS

SEQ ID NO: 362 - protein, 119 aa, synthetic construct
  REGION 1..119: note = Tar2h-131-70 anti-TNFR1 dAb
EVQLLESGGGLIQPGGSLRLSCAASGFTFAHETMVWVRQAPGKGLEWVSHIDRVGQDPYYADSVKGRFTISRDNSKNTLYLQMNSLRAEDTAVYYCALLPKRGPWFDYRGQGTLVTVSS

SEQ ID NO: 363 - protein, 119 aa, synthetic construct
  REGION 1..119: note = Tar2h-131-71 anti-TNFR1 dAb
EVQLLESGGGLIQPGGSLRLSCAASGFTFAHETMVWVRQAPGKGLEWVSHIDRVGQDTYYADSVKGRFTISRDNSKNTLYLQMNSLRAEDTAVYYCAMLPKRGPWFDYRGQGTLVTVSS

SEQ ID NO: 364 - protein, 119 aa, synthetic construct
  REGION 1..119: note = Tar2h-131-72 anti-TNFR1 dAb
EVQLLESGGGLIQPGGSLRLSCAASGFTFAHDTMVWVRQAPGKGLEWVSHIDRVGQDTYYADSVKGRFTISRDNTKNTLYLQMNSLRAEDTAVYYCALLPKRGPWFDYRGQGTLVTVSS

SEQ ID NO: 365 - protein, 119 aa, synthetic construct
  REGION 1..119: note = Tar2h-131-73 anti-TNFR1 dAb
EVQLLESGGGLIEPGGSLRLSCAASGFTFAHETMVWVRQAPGKGLEWVSHIDRVGQDTYYADSVKGRFTISRDNSKNTLYLQMNSLRAEDSAVYYCARLPKRGPWFDYRGQGTLVTVSS

SEQ ID NO: 366 - protein, 119 aa, synthetic construct
  REGION 1..119: note = Tar2h-131-74 anti-TNFR1 dAb
DVQLLESGGGLIQPGGSLRLSCAASGFTFAHETMVWVRQAPGKGLEWVSHIDRVGQDTYYADSVKGRFTISRDNSKNTLYLQMNSLRAEDTAAYYCAVLPKRGPWFDYRGQGTLVTVSS

SEQ ID NO: 367 - protein, 119 aa, synthetic construct
  REGION 1..119: note = Tar2h-131-75 anti-TNFR1 dAb
EVQLMESGGGLIQPGGSLRLSCAASGFTFAHETMVWVRQAPGKGLEWVSHIDRVGQDTYYADSVKGRFTISRDNSKNTLYLQMNSLRAEDTAVYYCAELPKRGPWFDHRGQGTLVTVSS

SEQ ID NO: 368 - protein, 119 aa, synthetic construct
  REGION 1..119: note = Tar2h-131-76 anti-TNFR1 dAb
EVQLLESGGGLIQPGGSLRLSCAASGFTFAHETMVWVRQAPGKGLEWVSHIDRVGQDTYYADSVKGRFAISRDNSKNTLYLQMNSLRAEDTAVYYCAMLPKRGPWFDYRGQGTLVTVSS

SEQ ID NO: 369 - protein, 119 aa, synthetic construct
  REGION 1..119: note = Tar2h-131-77 anti-TNFR1 dAb
EVQLLESGGGLIQPGGSLRLSCAASGFTFAHETMVWVRQAPGKGLEWVSHIDRVGQDTYYTDSVKGRFTISRDNSKNTLYLQMNSLRAEDTAVYYCALLPKRGPWFDYRGQGTMVTVSS

SEQ ID NO: 370 - protein, 119 aa, synthetic construct
  REGION 1..119: note = Tar2h-131-78 anti-TNFR1 dAb
EVQLLESGGGLMQPGGSLRLSCAASGFTFAHETMVWVRQAPGKGLEWVSHIDLVGQDTYYADSVKGRFTISRDNSKNTLYLQMNSLRAEDTAVYHCARLPKRGPWFDYRGQGTLVTVSS

SEQ ID NO: 371 - protein, 119 aa, synthetic construct
  REGION 1..119: note = Tar2h-131-79 anti-TNFR1 dAb
EVQLLESGGGLIQPGGSLRLSCATSGFTFAHETMVWVRQAPGKGLEWVSHIDRVGQDTYYADSVKGRFTISRDNSKNTLYMQMNSLRAEDTAVYYCAVLPKRGPWFDYQGQGTLVTVSS

SEQ ID NO: 372 - protein, 119 aa, synthetic construct
  REGION 1..119: note = Tar2h-131-80 anti-TNFR1 dAb
EVQLLESGGGLIQPGGSLRLSCAASGFTFAHETMVWVRQAPGKGLEWVSHIDRVGQDTYYADPVKGRFTISRDNSRNTLYLQMNSLRSEDTAVYYCAVLPKRGPWFDYRGQGTLVTVSS

SEQ ID NO: 373 - protein, 119 aa, synthetic construct
  REGION 1..119: note = Tar2h-131-81 anti-TNFR1 dAb
EVQLLESGGGLIQPGGSLRLSCAASGFTFAHETMVWVRQAPGKGLEWVSHIDRVGQDTYYADSVKGRFTISRDNSKNTLYLQMNSLRAEDTAVYSCALLPKRGPWFDYRGQGTLVTVSS

SEQ ID NO: 374 - protein, 119 aa, synthetic construct
  REGION 1..119: note = Tar2h-131-82 anti-TNFR1 dAb
EVQLLESGGGLIQPGGSLRLSCAASGFTFAHETMVWVRQAPGKGLEWVSHIDRVGQDTYYADSVKGRFTISRDNSKNALYLQMNSLRAEDTAVYYCAVLPKRGPWFDYRGQGTLVTVSS

SEQ ID NO: 375 - protein, 119 aa, synthetic construct
  REGION 1..119: note = Tar2h-131-83 anti-TNFR1 dAb
EVQLLESGGGLVQPGGSLRLSCAASGFTFAHETMVWVRQAPGKGLEWVSHIDRVGQDTYYADSVKGRFTISRDNSKNTLYLQMNSLRAEDTAVYYCALLPKRGPWFDYWGQGTLVTVSS

SEQ ID NO: 376 - protein, 119 aa, synthetic construct
  REGION 1..119: note = Tar2h-131-86 anti-TNFR1 dAb
EVQLLESGGGLIQPGGSLRLSCAASGFTFAHETMVWVREAPGKGLEWVSHIDRVGQDTYYADSVKGRFTISRDNSKNTLYLQMNSLRAEDTAVYYCAILPKRGPWFDYRGQGTLVTVSS

SEQ ID NO: 377 - protein, 119 aa, synthetic construct; identical to SEQ ID NO: 353
  REGION 1..119: note = Tar2h-131-87 anti-TNFR1 dAb

SEQ ID NO: 378 - protein, 119 aa, synthetic construct
  REGION 1..119: note = Tar2h-131-88 anti-TNFR1 dAb
EVQLLESGGGLIQPGGSLRLSCAASGFTFAHETMVWVRQAPGKGLEWVSHIDRVGQDTYYADPVKGRFTISRDNSRNTLYLQMNSLRAEDTAVYYCAVLPKRGPWFDYRGQGTLVTVSS

SEQ ID NO: 379 - protein, 119 aa, synthetic construct
  REGION 1..119: note = Tar2h-131-89 anti-TNFR1 dAb
EVQLLESGGDLIQPGGSLRLSCAASGFTFAHETMVWVRQAPGKGLEWVSHIDRVGQDTYYADSVKGRFTISRDNSKNTLYLQMNSLRAEDTAVYYCAVLPKRGPWFDYRGQGTLVTVSS

SEQ ID NO: 380 - protein, 119 aa, synthetic construct; identical to SEQ ID NO: 359
  REGION 1..119: note = Tar2h-131-90 anti-TNFR1 dAb

SEQ ID NO: 381 - protein, 119 aa, synthetic construct
  REGION 1..119: note = Tar2h-131-91 anti-TNFR1 dAb
EVQLLESGGGLIQPGGSLHLSCAASGFTFEHETMVWVRQAPGKGLEWVSHIDRVGQDPYYADSVKGRFTISRDNSKNTLYLQMNSLRAEDTAVYYCARLPKRGPWFDYRGQGTLVTVSS

SEQ ID NO: 382 - protein, 119 aa, synthetic construct
  REGION 1..119: note = Tar2h-131-92 anti-TNFR1 dAb
EVQLLESGGGLIQPGGSLRLSCAASGFTFAHDTMVWVRQAPGKGLEWVSHIDRVGQDTYYADSVKGRFTISRDNSKNTLYLQMNSLRAEDTAVYYCARLPKRGPWFDYRGQGTLVTVSS

SEQ ID NO: 383 - protein, 119 aa, synthetic construct
  REGION 1..119: note = Tar2h-131-93 anti-TNFR1 dAb
EVQLLESGGGLIQPGGSLRLSCAASGFTFAHETMVWVRQAPGKGLEWVSHIDRVGQDPYYADSVKGRFTISRDNSKNTLYLQMNSLRAEDTAVYYCARLPKRGPWFDYRGQGTLVTVSS

SEQ ID NO: 384 - protein, 119 aa, synthetic construct
  REGION 1..119: note = Tar2h-131-94 anti-TNFR1 dAb
EVQLLESGGGLIQPGGSLRLSCAASGFTFAHETMVWVRQAPGKDLEWVSHIDRVGQDTYYADSVKGRFTISRDNSKNTLYLQMNSLRAEDTAVYYCAVLPKRGPWFDYRGQGTLVTVSS

SEQ ID NO: 385 - protein, 119 aa, synthetic construct; identical to SEQ ID NO: 382
  REGION 1..119: note = Tar2h-131-95 anti-TNFR1 dAb

SEQ ID NO: 386 - protein, 119 aa, synthetic construct
  REGION 1..119: note = Tar2h-131-96 anti-TNFR1 dAb
EVQLLESGGGLIQPGGSLRLSCAASGFTFAHETMVWVRQAPGKGLEWVSHIDRVGQDTYYADSVKGRFTISRDNSKNTLYLQMNSLRAEDTAVYHCAVLPKRGPWFDYRGQGTLVTVSS

SEQ ID NO: 387 - protein, 119 aa, synthetic construct
  REGION 1..119: note = Tar2h-131-97 anti-TNFR1 dAb
EVQLLESGGGLIQPGGSLRLSCAASGFTFAHETMVWVREAPGKGLEWVSHIDRVGQDTYYADSVKGRFTISRDNSKNTLYLQMNSLRAEDTAVYYCAVLPKRGPWFDYRGQGTLVTVSS

SEQ ID NO: 388 - protein, 119 aa, synthetic construct
  REGION 1..119: note = Tar2h-131-99 anti-TNFR1 dAb
EVQLLESGGGLIHPGGTLRLSCAASGFTFAHETMVWVRQAPGKGLEWVSHIDRVGQDPYYADSVKGRFTISRDNSKNTLYLQMNSLRAEDTAVYYCARLPKRGPWFDYRGQGTLVTVSS

SEQ ID NO: 389 - protein, 119 aa, synthetic construct
  REGION 1..119: note = Tar2h-131-100 anti-TNFR1 dAb
EVQLLESGGGLIQPGGSLRLSCAASGFTFAHETMVWVRQAPGKGLEWVSHIDRVGQDPYYADSVKGRFTISRDNSKNTLYLQMNSLRAEDTAVYYCARLPKRGPWFDYRGQGTQVTVSS

SEQ ID NO: 390 - protein, 119 aa, synthetic construct; identical to SEQ ID NO: 375
  REGION 1..119: note = Tar2h-131-101 anti-TNFR1 dAb

SEQ ID NO: 391 - protein, 119 aa, synthetic construct
  REGION 1..119: note = Tar2h-131-102 anti-TNFR1 dAb
EVQLLESGGGLVQPGGSLRLSCAASGFTFAHETMVWVRQAPGKGLEWVSHIDRVGQDTYYADSVEGRFTISRDNSKNTLYLQMNSLRAEDTAVYYCAVLPKRGPWFDYWGQGTLVTVSS

SEQ ID NO: 392 - protein, 119 aa, synthetic construct
  REGION 1..119: note = Tar2h-131-103 anti-TNFR1 dAb
EVQLLESGGGLVQPGGSLRLSCAASGFTFAHETMVWVRQAPGKGLEWVSHIDRVGQDPYYADSVKGRFTISRDNSKNTLYLQMNSLRAEDTAVYYCALLPKRGPWFDYWGQGTLVTVSS

SEQ ID NO: 393 - protein, 119 aa, synthetic construct
  REGION 1..119: note = Tar2h-131-104 anti-TNFR1 dAb
EVQLLESGGGLIQPGGSLRLSCAASGFTFAHETMVWVRQAPGKDLEWVSHIDRDGQDTYYADSVKGRFSISRDNSKNTLYLQMNSLRAEDTAVYYCARLPKRGPWFDYRGQGTLVTVSS

SEQ ID NO: 394 - protein, 119 aa, synthetic construct
  REGION 1..119: note = Tar2h-131-105 anti-TNFR1 dAb
EVQLLESGGGLIQPGGSLRLSCAASGFTFAHETMVWVRQAPGKGLEWVSHIDRVGQDTYYADSVKGRFTTSRDNSKNTLYLQMNSLRAEDTAVYYCARLPKRGPWFDYRGQGTLVTVSS

SEQ ID NO: 395 - protein, 119 aa, synthetic construct
  REGION 1..119: note = Tar2h-131-106 anti-TNFR1 dAb
EVQLLESGGGLIQPGGSLRLSCAASGFTFAHETMVWVRQAPGKGLEWVSHIDRDGQDTYYADSVMGRFTVSRDNSKNTLYLQMNSLRAEDTAVYYCAIIPKRGPWFDYRGQGTLVTVSS

SEQ ID NO: 396 - protein, 119 aa, synthetic construct
  REGION 1..119: note = Tar2h-131-107 anti-TNFR1 dAb
EVQLLESGGGLIQPGGSLRLSCAASGFTFAHETMVWVRQAPGKDLEWVSHIDRVGQDTYYADSVEGRFTISRDNSKNTLYLQMNSLRAEDTAVYYCAVLPKRGPWFDYRGQGTLVTVSS

SEQ ID NO: 397 - protein, 119 aa, synthetic construct
  REGION 1..119: note = Tar2h-131-108 anti-TNFR1 dAb
EVQLLESGGGLIQPGGSLRLSCAASGFTFAHETMVWVRQAPGKGLEWVSHTDRVGQDTYYADSVKGRFTISRDNSRNTLYLQMNSLRAEDTAVYYCAVLPKRGPWFDYRGQGTLVTVSS

SEQ ID NO: 398 - protein, 119 aa, synthetic construct
  REGION 1..119: note = Tar2h-131-109 anti-TNFR1 dAb
EVQLLESGGGLIQPGGTLRLSCAASGFTFALETMVWVRQAPGKGLEWVSHIDRVGQDTYYADSVKGRFTTSRDNSRNTLYLQMNSLRAEDTAVYYCARLPKRGPWFDYRGQGTLVTVSS

SEQ ID NO: 399 - protein, 119 aa, synthetic construct
  REGION 1..119: note = Tar2h-131-110 anti-TNFR1 dAb
EVQLLESGGGLIQPGGSLRLSCAASGFTFAHETMVWVRQAPGKGLEWVSHIDRVGQDTYYADSVKGRFTISRDNSKNTLYLQMNSLRAEDTAVYYCAVIPKRGPWFDYRGQGTLVTVSS

SEQ ID NO: 400 - protein, 119 aa, synthetic construct
  REGION 1..119: note = Tar2h-131-111 anti-TNFR1 dAb
EVQLLESGGGLIQPGGSLRLSCAASGFTFAHETMVWVRQAPGKGLEWVSHIDRVGQDTYYADSVKGRFTISRDNSKNTLYLQMNSLRAEDTAVYYCAVLPKRGPWFDYRGQGTQVTVSS

SEQ ID NO: 401 - protein, 119 aa, synthetic construct
  REGION 1..119: note = Tar2h-131-112 anti-TNFR1 dAb
EVQLLESGGGLIQPGGSLRLSCAASGFTFAHETMVWVRQAPGKGIEWVSHIDRVGQDTYYADSVKGRFTISRDNSKNTLYLQMNSLRAEDTAVYYCAVLPKRGPWFDYRGQGTLVTVSS

SEQ ID NO: 402 - protein, 119 aa, synthetic construct
  REGION 1..119: note = Tar2h-131-113 anti-TNFR1 dAb
EVQLLESGGGLVQPGGSLRLSCAASGFTFAHDTMVWVRQAPGKGLEWVSHIDRVGQDTYYADSVEGRFTISRDNSKNTLYLQMNSLRAEDTAVYYCAVLPKRGPWFDYWGQGTLVTVSS

SEQ ID NO: 403 - protein, 119 aa, synthetic construct
  REGION 1..119: note = Tar2h-131-114 anti-TNFR1 dAb
EVQLLESGGGLVQPGGSLRLSCAASGFTFAHDVMVWVRQAPGKGLEWVSHIDRVGQDTYYADSVEGRFTISRDNSKNTLYLQMNSLRAEDTAVYYCAVLPKRGPWFDYWGQGTLVTVSS

SEQ ID NO: 404 - protein, 119 aa, synthetic construct
  REGION 1..119: note = Tar2h-131-115 anti-TNFR1 dAb
EVQLLESGGGLVQPGGSLRLSCAASGFTFAHETMVWVRQAPGKGLEWVSHIDRVGQDPYYTDSVEDRFTISRDNSKNTLYLQMNSLRAEDTAVYYCAVLPKRGPWFDYWGQGTLVTVSS

SEQ ID NO: 405 - protein, 119 aa, synthetic construct
  REGION 1..119: note = Tar2h-131-116 anti-TNFR1 dAb
EVQLLESGGGLVQPGGSLRLSCAASGFTFAHETMVWVRQAPGKGLEWVSHIDRVGQDTYYADSVEGRFTISRDNSKNTLYLQMNSLRAEDTAVYYCALLPKRGPWFDYWGQGTLVTVSS

SEQ ID NO: 406 - protein, 119 aa, synthetic construct
  REGION 1..119: note = Tar2h-131-117 anti-TNFR1 dAb
EVQLLESGGGLVQPGGSLRLSCAASGFTFAHETMVWVRQAPGKGLEWVSHIDRVGQDPYYADSVEGRFTISRDNSKNTLYLQMNSLRAEDTAVYYCAVLPKRGPWFDYWGQGTLVTVSS

SEQ ID NO: 407 - protein, 119 aa, synthetic construct
  REGION 1..119: note = Tar2h-131-120 anti-TNFR1 dAb
EVQLLESGGGLIQPGGSLRLSCAASGFTFNKETMVWVRQAPGKGLEWVSHIDRVGQDTYYADSVKGRFTISRDNSKNTLYLQMNSLRAEDTAVYYCALLPKRGPWFDYRGQGTLVTVSS

SEQ ID NO: 408 - protein, 119 aa, synthetic construct
  REGION 1..119: note = Tar2h-131-121 anti-TNFR1 dAb
EVQLLESGGGLIQPGGSLRLSCAASGFTFNTETMVWVRRAPGKGLEWVSHIDRVGQDTYYADSVKGRFTISRDNSKNTLYLQMNSLRAEDTAVYYCALLPKRGPWFDYRGQGTLVTVSS

SEQ ID NO: 409 - protein, 119 aa, synthetic construct
  REGION 1..119: note = Tar2h-131-122 anti-TNFR1 dAb
EVQLLESGGGLIQPGGSLRLSCAASGFTFTKETMVWVRQAPGKGLEWVSHIDRVGQDTYYADSVKGRFTISRDNSKNTLYLQMNSLRAEDTAVYYCALLPKRGPWFDYRGQGTLVTVSS

SEQ ID NO: 410 - protein, 119 aa, synthetic construct
  REGION 1..119: note = Tar2h-131-123 anti-TNFR1 dAb
EVQLLESGGGLIQPGGSLRLSCAASGFTFAHETMVWVRQAPGKGLEWVSHIDGGGVDTYYADPVKGRFTISRDNSKNTLYLQMNSLRAEDTAVYYCALLPKRGPWFDYRGQGTLVTVSS

SEQ ID NO: 411 - protein, 119 aa, synthetic construct
  REGION 1..119: note = Tar2h-131-124 anti-TNFR1 dAb
EVQLLESGGGLIQPGGSLRLSCAASGFTFAHETMVWVRQAPGKGLEWVSHIDGGGRDTYYADPVKGRFTISRDNSKNTLYLQMNSLRAEDTAVYYCALLPKRGPWFDYRGQGTLVTVSS

SEQ ID NO: 412 - protein, 119 aa, synthetic construct; identical to SEQ ID NO: 410
  REGION 1..119: note = Tar2h-131-125 anti-TNFR1 dAb

SEQ ID NO: 413 - protein, 119 aa, synthetic construct
  REGION 1..119: note = Tar2h-131-126 anti-TNFR1 dAb
EVQLLESGGGLIQPGGSLRLSCAASGFTFNNQVMVWVRQAPGKGLEWVSHIDRVGQDTYYADSVKGRFTISRDNSKNTLYLQMNSLRAEDTAVYYCALLPKRGPWFDYRGQGTLVTVSS

SEQ ID NO: 414 - protein, 119 aa, synthetic construct
  REGION 1..119: note = Tar2h-131-127 anti-TNFR1 dAb
EVQLLESGGGLIQPGGSLRLSCAASGFTFAHETMVWVRQAPGKGLEWVSHIDGGGLDTYYADPVKGRFTISRDNSKNTLYLQMNSLRAEDTAVYYCALLPKRGPWFDYRGQGTLVTVSS

SEQ ID NO: 415 - protein, 119 aa, synthetic construct
  REGION 1..119: note = Tar2h-131-128 anti-TNFR1 dAb
EVQLLESGGGLIQPGGSLRLSCAASGFTFAHETMVWVRQAPGKGLEWVSHIDAVGSDTYYADPVKGRFTISRDNSKNTLYLQMNSLRAEDTAVYYCALLPKRGPWFDYRGQGTLVTVSS

SEQ ID NO: 416 - protein, 119 aa, synthetic construct
  REGION 1..119: note = Tar2h-131-129 anti-TNFR1 dAb
EVQLLESGGGLIQPGGSLRLSCAASGFTFAHETMVWVRQAPGKGLEWVSHIDRVGQDTYYADSVKGRFTISRDNSKNTLYLQMNSLRAEDTAVYYCALLPKRGPWFDYRGQGTLVTVSS

SEQ ID NO: 417 - protein, 119 aa, synthetic construct
  REGION 1..119: note = Tar2h-131-130 anti-TNFR1 dAb
EVQLLESGGGLIQPGGSLRLSCAASGFTFGNEVMVWVRQAPGKGLEWVSHIDRVGQDTYYADSVKGRFTISRDNSKNTLYLQMNSLRAEDTAVYYCALLPKRGPWFDYRGQGTLVTVSG

SEQ ID NO: 418 - protein, 119 aa, synthetic construct
  REGION 1..119: note = Tar2h-131-131 anti-TNFR1 dAb
EVQLLESGGGLIQPGGSLRLSCAASGFTFNNQTMVWVRQAPGKGLEWVSHIDRVGQDTYYADSVKGRFTISRDNSKNTLYLQMNSLRAEDTAVYYCALLPKRGPWFDYRGQGTLVTVSS

SEQ ID NO: 419 - protein, 119 aa, synthetic construct
  REGION 1..119: note = Tar2h-131-132 anti-TNFR1 dAb
EVQLLESGGGLIQPGGSLRLSCAASGFTFDNTTMVWVRQAPGKGLEWVSHIDRVGQDTYYADSVKGRFTISRDNSKNTLYLQMNSLRAEDTAVYYCALLPKRGPWFDYRGQGTLVTVSS

SEQ ID NO: 420 - protein, 119 aa, synthetic construct
  REGION 1..119: note = Tar2h-131-136 anti-TNFR1 dAb
EVQLLESGGGLVQPGGSLRLSCAASGFTFAHETMVWVRQAPGKGLEWVSHIDRVGQDPYYADSVEGRFTISRDNSKNTLYLQMNSLRAEDTAVYYCALLPKRGPWFDYWGQGTLVTVSS

SEQ ID NO: 421 - protein, 119 aa, synthetic construct; identical to SEQ ID NO: 410
  REGION 1..119: note = Tar2h-131-151 anti-TNFR1 dAb

SEQ ID NO: 422 - protein, 119 aa, synthetic construct
  REGION 1..119: note = Tar2h-131-180 anti-TNFR1 dAb
EVQLLESGGGLIQPGGSLRLSCAASGFTFAHETMVWVRQAPGKGLEWVSHIDRVGQDPYYADSVEGRFTISRDNSKNTLYLQMNSLRAEDTAVYYCAVLPKRGPWFDYRGQGTLVTVSS

SEQ ID NO: 423 - protein, 119 aa, synthetic construct
  REGION 1..119: note = Tar2h-131-181 anti-TNFR1 dAb
EVQLLESGGGLIQPGGSLRLSCAASGFTFAHETMVWVRQAPGKGLEWVSHIDRVGQDPYYADSVEGRFTISRDNSKNTLYLQMNSLRAEDTAVYYCALLPKRGPWFDYRGQGTLVTVSS

SEQ ID NO: 424 - protein, 119 aa, synthetic construct
  REGION 1..119: note = Tar2h-131-182 anti-TNFR1 dAb
EVQLLESGGGLIQPGGSLRLSCAASGFTFAHETMVWVRQAPGKGLEWVSHIDRVGQDPYYADSVEGRFTISRDNSKNTLYLQMNSLRAEDTAVYYCAVLPKRGPWFDYWGQGTLVTVSS

SEQ ID NO: 425 - protein, 119 aa, synthetic construct; identical to SEQ ID NO: 424
  REGION 1..119: note = Tar2h-131-183 anti-TNFR1 dAb

SEQ ID NO: 426 - protein, 119 aa, synthetic construct
  REGION 1..119: note = Tar2h-131-184 anti-TNFR1 dAb
EVQLLESGGGLIQPGGSLRLSCAASGFTFAHETMVWVRQAPGKGLEWVSHIDRVGQDPYYADSVEGRFTISRDNSKNTLYLQMNSLRAEDTAVYYCALLPKRGPWFDYWGQGTLVTVSS

SEQ ID NO: 427 - protein, 119 aa, synthetic construct
  REGION 1..119: note = Tar2h-131-185 anti-TNFR1 dAb
EVQLLESGGGLVQPGGSLRLSCAASGFTFAHETMVWVRQAPGKGLEWVSHIDRVGQDPYYADSVEGRFTISRDNSKNTLYLQMNSLRAEDTAVYYCALLPKRGPWFDYRGQGTLVTVSS

SEQ ID NO: 428 - protein, 119 aa, synthetic construct
  REGION 1..119: note = Tar2h-131-188 anti-TNFR1 dAb
EVQLLESGGGLIQPGGSLRLSCAASGFTFAHETMVWVRQAPGKGLEWVSHIDGGGVDTYYADPVKGRFTISRDNSKNTLYLQMNSLRAEDTAVYYCALLPKRGPWFDYWGQGTLVTVSS

SEQ ID NO: 429 - protein, 119 aa, synthetic construct
  REGION 1..119: note = Tar2h-131-189 anti-TNFR1 dAb
EVQLLESGGGLVQPGGSLRLSCAASGFTFAHETMVWVRQAPGKGLEWVSHIDGGGVDTYYADPVKGRFTISRDNSKNTLYLQMNSLRAEDTAVYYCALLPKRGPWFDYWGQGTLVTVSS

SEQ ID NO: 430 - protein, 119 aa, synthetic construct
  REGION 1..119: note = Tar2h-131-190 anti-TNFR1 dAb
EVQLLESGGGLIQPGGSLRLSCAASGFTFAHETMVWVRQAPGKGLEWVSHIDGGGVDTYYADPVKGRFTISRDNSKNTLYLQMNSLRAEDTAVYYCAVLPKRGPWFDYRGQGTLVTVSS

SEQ ID NO: 431 - protein, 119 aa, synthetic construct
  REGION 1..119: note = Tar2h-131-191 anti-TNFR1 dAb
EVQLLESGGGLVQPGGSLRLSCAASGFTFAHETMVWVRQAPGKGLEWVSHIDGGGVDTYYADPVKGRFTISRDNSKNTLYLQMNSLRAEDTAVYYCAVLPKRGPWFDYRGQGTLVTVSS

SEQ ID NO: 432 - protein, 119 aa, synthetic construct
  REGION 1..119: note = Tar2h-131-192 anti-TNFR1 dAb
EVQLLESGGGLIQPGGSLRLSCAASGFTFAHETMVWVRQAPGKGLEWVSHIDGGGVDTYYADPVKGRFTISRDNSKNTLYLQMNSLRAEDTAVYYCAVLPKRGPWFDYWGQGTLVTVSS

SEQ ID NO: 433 - protein, 119 aa, synthetic construct
  REGION 1..119: note = Tar2h-131-193 anti-TNFR1 dAb
EVQLLESGGGLVQPGGSLRLSCAASGFTFAHETMVWVRQAPGKGLEWVSHIDGGGVDTYYADPVKGRFTISRDNSKNTLYLQMNSLRAEDTAVYYCAVLPKRGPWFDYWGQGTLVTVSS

SEQ ID NO: 434 - protein, 119 aa, synthetic construct
  REGION 1..119: note = Tar2h-131-194 anti-TNFR1 dAb
EVQLLESGGGLVQPGGSLRLSCAASGFTFAHETMVWVRQAPGKGLEWVSHIPPVGQDPFYADSVKGRFTISRDNSKNTLYLQMNSLRAEDTAVYYCAVLPKRGPWFDYWGQGTLVTVSS

SEQ ID NO: 435 - protein, 119 aa, synthetic construct
  REGION 1..119: note = Tar2h-131-195 anti-TNFR1 dAb
EVQLLESGGGLIQPGGSLRLSCAASGFTFAHETMVWVRQAPGKGLEWVSHIPPVGQDPFYADSVKGRFTISRDNSKNTLYLQMNSLRAEDTAVYYCALLPKRGPWFDYWGQGTLVTVSS

SEQ ID NO: 436 - protein, 119 aa, synthetic construct
  REGION 1..119: note = Tar2h-131-196 anti-TNFR1 dAb
EVQLLESGGGLIQPGGSLRLSCAASGFTFAHETMVWVRQAPGKGLEWVSHIPPVGQDPFYADSVKGRFTISRDNSKNTLYLQMNSLRAEDTAVYYCAVLPKRGPWFDYWGQGTLVTVSS

SEQ ID NO: 437 - protein, 119 aa, synthetic construct
  REGION 1..119: note = Tar2h-131-197 anti-TNFR1 dAb
EVQLLESGGGLIQPGGSLRLSCAASGFTFAHETMVWVRQAPGKGLEWVSHIDGGGVDTYYADPVKGRFTISRDNSKNSLYLQMNSLRAEDTAVYYCALLPKRGPWFDYWGQGTLVTVSS

SEQ ID NO: 438 - protein, 119 aa, synthetic construct
  REGION 1..119: note = Tar2h-131-198 anti-TNFR1 dAb
EVQLLESGGGLVQPGGSLRLSCAASGFTFAHETMVWVRQAPGKGLEWVSHIPPVGQDPFYADSVKGRFTISRDNSKNSLYLQMNSLRAEDTAVYYCALLPKRGPWFDYWGQGTLVTVSS

SEQ ID NO: 439 - protein, 119 aa, synthetic construct
  REGION 1..119: note = Tar2h-131-500 anti-TNFR1 dAb
EVQLLESGGGLVQPGGSLRLSCAASGFTFHDQHMVWVRQAPGKGLEWVSHIDRVGQDTYYADSVKGRFTISRDNSKNTLYLQMNSLRAEDTAVYYCALLPKRGPWFDYWGQGTLVTVSS

SEQ ID NO: 440 - protein, 119 aa, synthetic construct
  REGION 1..119: note = Tar2h-131-501 anti-TNFR1 dAb
EVQLLESGGGLVQPGGSLRLSCAASGFTFANNIMVWVRQAPGKGLEWVSHIDRVGQDTYYADSVKGRFTISRDNSKNTLYLQMNNLRAEDTAVYYCALLPKRGPWFDYWGQGTLVTVSS

SEQ ID NO: 441 - protein, 119 aa, synthetic construct
  REGION 1..119: note = Tar2h-131-502 anti-TNFR1 dAb
EVQLLESGGGLVQPGGSLRLSCAASGFSFKNKTMVWVRQAQGKGLEWVSHIDRVGQDTYYADSVKGRFTISRDNSKNTLYLQMNSLRAEDTAVYYCALLPKRGPWFDYWGQGTLVTVSS

SEQ ID NO: 442 - protein, 119 aa, synthetic construct
  REGION 1..119: note = Tar2h-131-503 anti-TNFR1 dAb
EVQLLESGGGLVQPGGSLRLSCAASGFTFNKHTMVWVRQAPGKGLEWVSHIDRVGQDTYYADSVKGRFTISRDNSKNTLYLQMNSLRAEDTAVYYCALLPKRGPWFDYWGQGTLVTVSS

SEQ ID NO: 443 - protein, 119 aa, synthetic construct
  REGION 1..119: note = Tar2h-131-504 anti-TNFR1 dAb
EVQLLESGGGLVQPGGSLRLSCAASGFTFNNETMVWVRQAPGKGLEWVSHIDRVGQDTYYADSVKGRFTISRDNSKNTLYLQMNSLRAEDTAVYYCALLPKRGPWFDYWGQGTLVTVSS

SEQ ID NO: 444 - protein, 119 aa, synthetic construct
  REGION 1..119: note = Tar2h-131-505 anti-TNFR1 dAb
EVQLLESGGGLVQPGGSLRLSCAASGFTFAHETMVWVRQAPGKGLEWVSHIDGRGGGTYYTDSVKGRFTTSRDNSKNTLYLQMNSLRAEDTAVYYCALLPKRGPWFDYWGQGTLVTVSS

SEQ ID NO: 445 - protein, 119 aa, synthetic construct
  REGION 1..119: note = Tar2h-131-506 anti-TNFR1 dAb
EVQLLESGGGLVQPGGSLRLSCAASGFTFAHETMVWVRQAPGKGLEWVSHIDQQGEGTYYTDSVKGRFTISRDNSKNTLYLQMNSLRAEDTAVYYCALLPKRGPWFDYWGQGTLVTVSS

SEQ ID NO: 446 - protein, 119 aa, synthetic construct
  REGION 1..119: note = Tar2h-131-507 anti-TNFR1 dAb
EVQLLESGGGLVQPGGSLRLSCAASGFTFAHETMVWVRQAPGKGLEWVSHIDGGGGGTYYADSVKGRFTISRDNSKNTLYLQMNSLRAEDTAVYYCALLPKRGPWFDYWGQGTLVTVSS

SEQ ID NO: 447 - protein, 119 aa, synthetic construct
  REGION 1..119: note = Tar2h-131-508 anti-TNFR1 dAb
EVQLLESGGGLVQPGGSLRLSCAASGFTFAHETMVWVRQAPGKGLEWVSHIDGGGLGTYYADSVKGRFTISRDNSKNTLYLQMNSLRAEDTAVYYCALLPKRGPWFDYWGQGTLVTVSS

SEQ ID NO: 448 - protein, 119 aa, synthetic construct
  REGION 1..119: note = Tar2h-131-509 anti-TNFR1 dAb
EVQLLESGGGLVQPGGSLRLSCAASGFTFAHETMVWVRQAPGKGLEWVSHIDRVGQDTYYADSVKGRFTISRDNSKNTLYLQMNSLRAEDTAVYYCARLPKRGPWFDYWGQGTLVTVSS

SEQ ID NO: 449 - protein, 119 aa, synthetic construct
  REGION 1..119: note = Tar2h-131-510 anti-TNFR1 dAb
EVQLLESGGGLVQPGGSLRLSCAASGFTFNNKTMVWVRQAPGKGLEWVSHIDGRGERTYYADSVKGRFTISRDNSKNTLYLQMNSLRAEDTAVYYCALLPKRGPWFDYWGQGTLVTVSS

SEQ ID NO: 450 - protein, 119 aa, synthetic construct; identical to SEQ ID NO: 60
  REGION 1..119: note = Tar2h-131-511 anti-TNFR1 dAb

SEQ ID NO: 451 - protein, 119 aa, synthetic construct
  REGION 1..119: note = Tar2h-131-512 anti-TNFR1 dAb
EVQLLESGGGLVQPGGSLRLSCAASGFTFAHETMVWVRQAPGRGLEWVSHIDRVGQDTYYADSVKGRFTISRDNSKNTLYLQMNSLRAEDTAVYYCALLPKRGPWFDYWGQGTLVTVSS

SEQ ID NO: 452 - protein, 119 aa, synthetic construct
  REGION 1..119: note = Tar2h-131-513 anti-TNFR1 dAb
EVQLLESGGGLVQPGGSLRLSCAASGFTFAHETMVWVRQAPGKGLEWVSHIDRVGQDTYYADSVKGRFTISRDNSKNTLYLQMNSLRAEDTAVYYCARLPRRGPWFDYWGQGTLVTVSS

SEQ ID NO: 453 - protein, 119 aa, synthetic construct
  REGION 1..119: note = Tar2h-131-514 anti-TNFR1 dAb
  VARIANT 4: note = Xaa = any amino acid
EVQXLESGGGLVQPGGSLRLSCAASGFTFAHETMVWVRQAPGKGLEWVSHIDRVGQDTYYADSVRGRFTISRDNSKNTLYLQMNSLRAEDTAVYYCALLPKRGPWFDYWGQGTLVTVSS

SEQ ID NO: 454 - protein, 119 aa, synthetic construct
  REGION 1..119: note = Tar2h-131-515 anti-TNFR1 dAb
EVQLLESGGGLVQPGGSLRLSCAASGFTFAHETMVWVRQAPGKGLEWVSHISDDGNSTYYADSVKGRFTISRDNSKNTLYLQMNSLRAEDTAVYYCARLPKRGPWFDYWGQGTLVTVSS

SEQ ID NO: 455 - protein, 119 aa, synthetic construct
  REGION 1..119: note = Tar2h-131-516 anti-TNFR1 dAb
EVQLLESGGGLVQPGGSLRLSCAASGFTFAHEAMVWVRQAPGKGLEWVSHIDGGGESTYYADSVKGRFTISRDNSKNTLYLQMNSLRAEDTAVYYCARLPPPGPWFDYWGQGTLVTVSS

SEQ ID NO: 456 - protein, 119 aa, synthetic construct
  REGION 1..119: note = Tar2h-131-517 anti-TNFR1 dAb
EVQLLESGGGLVQPGGSLRLSCAASGFTFHNKDMVWVRQAPGKGLEWVSHIDGGGESTYYADSVKGRFTISRDNSKNTLYLQMNSLRAEDTAVYYCARLPLLLPWFDYWGQGTLVTVSS

SEQ ID NO: 457 - protein, 119 aa, synthetic construct
  REGION 1..119: note = Tar2h-131-518 anti-TNFR1 dAb
EVQLLESGGGLVQPGGSLRLSCAASGFTFAMRTMVWVRQAPGKGLEWVSHIDGGGESTYYADSVKGRFTISRDNSKNTLYLQMNSLRAEDTAVYYCARLPKRGPWFDYWGQGTLVTVSS

SEQ ID NO: 458 - protein, 119 aa, synthetic construct
  REGION 1..119: note = Tar2h-131-519 anti-TNFR1 dAb
EVQLLESGGGLVQPGGSLRLSCAASGFTFAHETMVWVRQAPGKGLEWVSHIDGGGESTYYADSVKGRFTISRDNSKNTLYLQMNSLRAEDTAVYYCARLPKRGPWFDYWGQGTLVTVSS

SEQ ID NO: 459 - protein, 119 aa, synthetic construct
  REGION 1..119: note = Tar2h-131-520 anti-TNFR1 dAb
EVQLLESGGGLVQPGGSLRLSCAASGFTFAHETMVWVRQAPGKGLEWVSHIDGGGLVTYYTDSVKGRFTISRDNSKNTLYLQMNSLRAEDTAVYYCALLPKRGPWFDYWGQGTLVTVSS

SEQ ID NO: 460 - protein, 119 aa, synthetic construct
  REGION 1..119: note = Tar2h-131-521 anti-TNFR1 dAb
EVQLLESGGGLVQPGGSLRLSCAASGFTFNNTTMVWVRQAPGKGLEWVSHIDGVGGDTYYADPVKGRFTISRDNSKNTLYLQMNSLRAEDTAVYYCALLPKRGPWFDYWGQGTLVTVSS

SEQ ID NO: 461 - protein, 119 aa, synthetic construct
  REGION 1..119: note = Tar2h-131-522 anti-TNFR1 dAb
EVQLLESGGGLVQPGGSLRLSCAASGFTFANKTMVWVRQAPGKGLEWVSHIDGLGLVTYYADSVEGRFTISRDNSKNTLYLQMNSLRAEDTAVYYCALLPKRGPWFDYWGQGTLVTVSS

SEQ ID NO: 462 - protein, 119 aa, synthetic construct
  REGION 1..119: note = Tar2h-131-523 anti-TNFR1 dAb
EVQLLESGGGLVQPGGSLRLSCAASGFTFNTTNMVWVRQAPGKGLEWVSEIRVGGGDTYYADSVKGRFTISRDNSKNTLYLQMNSLRAEDTAVYYCALLPKRGPWFDYWGQGTLVTVSS

SEQ ID NO: 463 - protein, 119 aa, synthetic construct
  REGION 1..119: note = Tar2h-131-524 anti-TNFR1 dAb
EVQLLESGGGLVQPGGSLRLSCAASGFTFKNKTMVWVRQAPGKGLEWVSHIDQEGEGTYYADSVKGRFTISRDNSKNTLYLQMNSLRAEDTAVYYCALLPKRGPWFDYRGQGTLVTVSS

SEQ ID NO: 464 - protein, 119 aa, synthetic construct
  REGION 1..119: note = Tar2h-131-525 anti-TNFR1 dAb
EVQLLESGGGLVQPGGSLRLSCAASGFTFNNTTMVWVRQAPGKGLEWVSHIDGEGSVTYYADSVKGRFTISRDNSKNTLYLQMNSLRAEDTAVYYCALLPKRGPWFDYWGQGTLVTVSS

SEQ ID NO: 465 - protein, 119 aa, synthetic construct
  REGION 1..119: note = Tar2h-131-526 anti-TNFR1 dAb
EVQLLESGGGLVQPGGSLRLSCAASGFTFENKTMVWVRQAPGKGLEWVSHIDATGTITYYADSVKGRFTISRDNSKNTLYLQMNSLRAEDTAVYYCALLPKRGPWFDYRGQGTLVTVSS

SEQ ID NO: 466 - protein, 119 aa, synthetic construct
  REGION 1..119: note = Tar2h-131-527 anti-TNFR1 dAb
EVQLLESGGGLVQPGGSLRLSCAASGFTFNKKTMVWVRQAPGKGLEWVSHIDGKGQATYYADSVKGRFTISRDNSKNTLYLQMNSLRAEDTAVYYCALLPKRGPWFDYWGQGTLVTVSS

SEQ ID NO: 467 - protein, 119 aa, synthetic construct
  REGION 1..119: note = Tar2h-131-528 anti-TNFR1 dAb
  VARIANT 4: note = Xaa = any amino acid
EVQXLESGGGLVQPGGSLRLSCAASGFTFAHETMVWVRQAPGKGLEWVSHIDRVGQDTYYADSVEGRFTISRDNSKNTLYLQMNSLRAEDTAVYYCALLPKRGPWFDYWGQGTLVTVSS

SEQ ID NO: 468 - protein, 119 aa, synthetic construct
  REGION 1..119: note = Tar2h-131-529 anti-TNFR1 dAb
EVQLLESGGGLVQPGGSLRLSCAASGFTFAHETMVWVRQAPGKGLEWVSHIDGGGESTYYADSVEGRFTISRDNSKNTLYLQMNSLRAEDTAVYYCARLPKRGPWFDYWGQGTLVTVSS

SEQ ID NO: 469 - protein, 119 aa, synthetic construct
  REGION 1..119: note = Tar2h-131-530 anti-TNFR1 dAb
EVQLLESGGGLVQPGGSLRLSCAASGFTFAHETMVWVRQAPGKGLEWVSHIDGGGESTYYADPVEGRFTISRDNSKNTLYLQMNSLRAEDTAVYYCARLPKRGPWFDYWGQGTLVTVSS

SEQ ID NO: 470 - protein, 119 aa, synthetic construct
  REGION 1..119: note = Tar2h-131-531 anti-TNFR1 dAb
EVQLLESGGGLVQPGGSLRLSCAASGFTFENKTMVWVRQAPGKGLEWVSHIDATGTITYYADSVEGRFTISRDNSKNTLYLQMNSLRAEDTAVYYCALLPKRGPWFDYRGQGTLVTVSS

SEQ ID NO: 471 - protein, 119 aa, synthetic construct
  REGION 1..119: note = Tar2h-131-532 anti-TNFR1 dAb
EVQLLESGGGLVQPGGSLRLSCAASGFTFNKKTMVWVRQAPGKGLEWVSHIDGKGQATYYADSVEGRFTISRDNSKNTLYLQMNSLRAEDTAVYYCALLPKRGPWFDYWGQGTLVTVSS

SEQ ID NO: 472 - protein, 119 aa, synthetic construct
  REGION 1..119: note = Tar2h-131-533 anti-TNFR1 dAb
EVQLLESGGGLVQPGGSLRLSCAASGFTFNKKTMVWVRQAPGKGLEWVSHIDGKGQDPFYTDSVKGRFTISRDNSKNTLYLQMNSLRAEDTAVYYCALLPKRGPWFDYWGQGTLVTVSS

SEQ ID NO: 473 - protein, 119 aa, synthetic construct
  REGION 1..119: note = Tar2h-131-534 anti-TNFR1 dAb
EVQLLESGGGLVQPGGSLRLSCAASGFTFAHETMVWVRQAPGKGLEWVSHIDGGGLVTYYTDPVKGRFTISRDNSKNTLYLQMNSLRAEDTAVYYCALLPKRGPWFDYWGQGTLVTVSS

SEQ ID NO: 474 - protein, 119 aa, synthetic construct
  REGION 1..119: note = Tar2h-131-535 anti-TNFR1 dAb
EVQLLESGGGLVQPGGSLRLSCAASGFTFAHETMVWVRQAPGKGLEWVSHIDGGGLVTYYTDSVEGRFTISRDNSKNTLYLQMNSLRAEDTAVYYCALLPKRGPWFDYWGQGTLVTVSS

SEQ ID NO: 475 - protein, 119 aa, synthetic construct
  REGION 1..119: note = Tar2h-131-536 anti-TNFR1 dAb
EVQLLESGGGLVQPGGSLRLSCAASGFTFAHETMVWVRQAPGKGLEWVSHIDGGGLVTYYTDPVEGRFTISRDNSKNTLYLQMNSLRAEDTAVYYCALLPKRGPWFDYWGQGTLVTVSS

SEQ ID NO: 476 - protein, 119 aa, synthetic construct
  REGION 1..119: note = Tar2h-131-537 anti-TNFR1 dAb
EVQLLESGGGLVQPGGSLRLSCAASGFTFAHETMVWVRQAPGKGLEWVSHIPPVGQDPFYADSVEGRFTISRDNSKNTLYLQMNSLRAEDTAVYYCALLPKRGPWFDYWGQGTLVTVSS

SEQ ID NO: 477 - protein, 119 aa, synthetic construct
  REGION 1..119: note = Tar2h-131-538 anti-TNFR1 dAb
EVQLLESGGGLVQPGGSLRLSCAASGFTFAHETMVWVRQAPGKGLEWVSHIPPVGQDPFYADPVKGRFTISRDNSKNTLYLQMNSLRAEDTAVYYCALLPKRGPWFDYWGQGTLVTVSS

SEQ ID NO: 478 - protein, 119 aa, synthetic construct
  REGION 1..119: note = Tar2h-131-539 anti-TNFR1 dAb
EVQLLESGGGLVQPGGSLRLSCAASGFTFAHETMVWVRQAPGKGLEWVSHIPPVGQDPFYTDSVKGRFTISRDNSKNTLYLQMNSLRAEDTAVYYCALLPKRGPWFDYWGQGTLVTVSS

SEQ ID NO: 479 - protein, 119 aa, synthetic construct
  REGION 1..119: note = Tar2h-131-540 anti-TNFR1 dAb
EVQLLESGGGLVQPGGSLRLSCAASGFTFAHETMVWVRQAPGKGLEWVSHIPPVGQDPFYTDSVEGRFTISRDNSKNTLYLQMNSLRAEDTAVYYCALLPKRGPWFDYWGQGTLVTVSS

SEQ ID NO: 480 - protein, 119 aa, synthetic construct
  REGION 1..119: note = Tar2h-131-541 anti-TNFR1 dAb
EVQLLESGGGLVQPGGSLRLSCAASGFTFAHETMVWVRQAPGKGLEWVSHIDGGGESTYYTDPVKGRFTISRDNSKNTLYLQMNSLRAEDTAVYYCARLPKRGPWFDYWGQGTLVTVSS

SEQ ID NO: 481 - protein, 119 aa, synthetic construct
  REGION 1..119: note = Tar2h-131-542 anti-TNFR1 dAb
EVQLLESGGGLVQPGGSLRLSCAASGFTFAHETMVWVRQAPGKGLEWVSHIDGGGESTYYTDSVEGRFTISRDNSKNTLYLQMNSLRAEDTAVYYCARLPKRGPWFDYWGQGTLVTVSS

SEQ ID NO: 482 - protein, 119 aa, synthetic construct
  REGION 1..119: note = Tar2h-131-543 anti-TNFR1 dAb
EVQLLESGGGLVQPGGSLRLSCAASGFTFAHETMVWVRQAPGKGLEWVSHIDGGGESTYYTDPVEGRFTISRDNSKNTLYLQMNSLRAEDTAVYYCARLPKRGPWFDYWGQGTLVTVSS

SEQ ID NO: 483 - protein, 119 aa, synthetic construct
  REGION 1..119: note = Tar2h-131-544 anti-TNFR1 dAb
EVQLLESGGGLVQPGGSLRLSCAASGFTFNKKTMVWVRQAPGKGLEWVSHIDGKGQATYYTDPVKGRFTISRDNSKNTLYLQMNSLRAEDTAVYYCALLPKRGPWFDYWGQGTLVTVSS

SEQ ID NO: 484 - protein, 119 aa, synthetic construct
  REGION 1..119: note = Tar2h-131-545 anti-TNFR1 dAb
EVQLLESGGGLVQPGGSLRLSCAASGFTFNKKTMVWVRQAPGKGLEWVSHIDGKGQATYYTDSVEGRFTISRDNSKNTLYLQMNSLRAEDTAVYYCALLPKRGPWFDYWGQGTLVTVSS

SEQ ID NO: 485 - protein, 119 aa, synthetic construct
  REGION 1..119: note = Tar2h-131-546 anti-TNFR1 dAb
EVQLLESGGGLVQPGGSLRLSCAASGFTFNKKTMVWVRQAPGKGLEWVSHIDGKGQATYYTDPVEGRFTISRDNSKNTLYLQMNSLRAEDTAVYYCALLPKRGPWFDYWGQGTLVTVSS

SEQ ID NO: 486 - protein, 119 aa, synthetic construct
  REGION 1..119: note = Tar2h-131-547 anti-TNFR1 dAb
EVQLLESGGGLVQPGGSLRLSCAASGFTFAHETMVWVRQAPGKGLEWVSHIPPVGQDPFYTDPVKGRFTISRDNSKNTLYLQMNSLRAEDTAVYYCALLPKRGPWFDYWGQGTLVTVSS

SEQ ID NO: 487 - protein, 119 aa, synthetic construct
  REGION 1..119: note = Tar2h-131-548 anti-TNFR1 dAb
EVQLLESGGGLVQPGGSLRLSCAASGFTFAHETMVWVRQAPGKGLEWVSHIPPVGQDPFYADPVEGRFTISRDNSKNTLYLQMNSLRAEDTAVYYCALLPKRGPWFDYWGQGTLVTVSS

SEQ ID NO: 488 - protein, 119 aa, synthetic construct
  REGION 1..119: note = Tar2h-131-549 anti-TNFR1 dAb
EVQLLESGGGLVQPGGSLRLSCAASGFTFNKKTMVWVRQAPGKGLEWVSHIDGKGQDPFYTDSVEGRFTISRDNSKNTLYLQMNSLRAEDTAVYYCALLPKRGPWFDYWGQGTLVTVSS

SEQ ID NO: 489 - protein, 119 aa, synthetic construct
  REGION 1..119: note = Tar2h-131-550 anti-TNFR1 dAb
EVQLLESGGGLVQPGGSLRLSCAASGFTFNKKTMVWVRQAPGKGLEWVSHIDGKGQDPFYADPVKGRFTISRDNSKNTLYLQMNSLRAEDTAVYYCALLPKRGPWFDYWGQGTLVTVSS

SEQ ID NO: 490 - protein, 119 aa, synthetic construct
  REGION 1..119: note = Tar2h-131-551 anti-TNFR1 dAb
EVQLLESGGGLVQPGGSLRLSCAASGFTFNKKTMVWVRQAPGKGLEWVSHIDGKGQDPFYTDPVKGRFTISRDNSKNTLYLQMNSLRAEDTAVYYCALLPKRGPWFDYWGQGTLVTVSS

SEQ ID NO: 491 - protein, 119 aa, synthetic construct; identical to SEQ ID NO: 488
  REGION 1..119: note = Tar2h-131-552 anti-TNFR1 dAb

SEQ ID NO: 492 - protein, 119 aa, synthetic construct
  REGION 1..119: note = Tar2h-131-553 anti-TNFR1 dAb
EVQLLESGGGLVQPGGSLRLSCAASGFTFNKKTMVWVRQAPGKGLEWVSHIDGKGQDPFYTDPVEGRFTISRDNSKNTLYLQMNSLRAEDTAVYYCALLPKRGPWFDYWGQGTLVTVSS

SEQ ID NO: 493 - protein, 119 aa, synthetic construct
  REGION 1..119: note = Tar2h-131-554 anti-TNFR1 dAb
EVQLLESGGGLVQPGGSLRLSCAASGFTFAHETMVWVRQAPGKGLEWVSHIPPVGQDPFYTDPVEGRFTISRDNSKNTLYLQMNSLRAEDTAVYYCALLPKRGPWFDYWGQGTLVTVSS

SEQ ID NO: 494 - protein, 119 aa, synthetic construct
  REGION 1..119: note = Tar2h-131-555 anti-TNFR1 dAb
EVQLLESGGGLVQPGGSLRLSCAASGFTFAHETMVWVRQAPGKGLEWVSHIDGGGESPYYADSVKGRFTISRDNSKNTLYLQMNSLRAEDTAVYYCARLPKRGPWFDYWGQGTLVTVSS

SEQ ID NO: 495 - protein, 119 aa, synthetic construct; identical to SEQ ID NO: 435
  REGION 1..119: note = Tar2h-131-556 anti-TNFR1 dAb

SEQ ID NO: 496 - protein, 119 aa, synthetic construct
  REGION 1..119: note = Tar2h-131-557 anti-TNFR1 dAb
EVQLLESGGGLIQPGGSLRLSCAASGFTFAHETMVWVRQAPGKGLEWVSHIPPVGQDPFYADPVKGRFTISRDNSKNTLYLQMNSLRAEDTAVYYCALLPKRGPWFDYWGQGTLVTVSS

SEQ ID NO: 497 - protein, 119 aa, synthetic construct
  REGION 1..119: note = Tar2h-131-558 anti-TNFR1 dAb
EVQLLESGGGLIQPGGSLRLSCAASGFTFAHETMVWVRQAPGKGLEWVSHIPPVGQDPFYTDSVKGRFTISRDNSKNTLYLQMNSLRAEDTAVYYCALLPKRGPWFDYWGQGTLVTVSS

SEQ ID NO: 498 - protein, 119 aa, synthetic construct
  REGION 1..119: note = Tar2h-131-559 anti-TNFR1 dAb
EVQLLESGGGLIQPGGSLRLSCAASGFTFAHETMVWVRQAPGKGLEWVSHIPPVGQDPFYTDSVEGRFTISRDNSKNTLYLQMNSLRAEDTAVYYCALLPKRGPWFDYWGQGTLVTVSS

SEQ ID NO: 499 - protein, 119 aa, synthetic construct
  REGION 1..119: note = Tar2h-131-560 anti-TNFR1 dAb
EVQLLESGGGLIQPGGSLRLSCAASGFTFAHETMVWVRQAPGKGLEWVSHIDGGGESTYYADSVEGRFTISRDNSKNTLYLQMNSLRAEDTAVYYCARLPKRGPWFDYWGQGTLVTVSS

SEQ ID NO: 500 - protein, 119 aa, synthetic construct
  REGION 1..119: note = Tar2h-131-561 anti-TNFR1 dAb
EVQLLESGGGLIQPGGSLRLSCAASGFTFAHETMVWVRQAPGKGLEWVSHIDGGGESTYYTDPVKGRFTISRDNSKNTLYLQMNSLRAEDTAVYYCARLPKRGPWFDYWGQGTLVTVSS

SEQ ID NO: 501 - protein, 119 aa, synthetic construct
  REGION 1..119: note = Tar2h-131-562 anti-TNFR1 dAb
EVQLLESGGGLIQPGGSLRLSCAASGFTFAHETMVWVRQAPGKGLEWVSHIDGGGESTYYTDSVEGRFTISRDNSKNTLYLQMNSLRAEDTAVYYCARLPKRGPWFDYWGQGTLVTVSS

SEQ ID NO: 502 - protein, 119 aa, synthetic construct
  REGION 1..119: note = Tar2h-131-563 anti-TNFR1 dAb
EVQLLESGGGLIQPGGSLRLSCAASGFTFAHETMVWVRQAPGKGLEWVSHIDGGGESTYYTDPVEGRFTISRDNSKNTLYLQMNSLRAEDTAVYYCARLPKRGPWFDYWGQGTLVTVSS

SEQ ID NO: 503 - protein, 119 aa, synthetic construct
  REGION 1..119: note = DOM1h-574' anti-TNFR1 dAb
EVQLLESGGGLVQPGGSLRLSCAASGFTFVKYSMGWVRQAPGKGLEWVSQISNTGGHTYYADSVKGRFTISRDNSKNTLYLQMNSLRAEDTAVYYCAKYTGHWEPFDYWGQGTLVTVSS

SEQ ID NO: 504 - protein, 119 aa, synthetic construct
  REGION 1..119: note = DOM1h-574-1 anti-TNFR1 dAb
EVQLLESGGGLVQPGGSLRLSCAASGFTFVKYSMGWVRQAPGKGLEWVSQISNTGGHTYYADSVKGRFTISRDNSKNTLYLQMNSLRAEDTAVYYCAKYTGRWEPYDYWGQGTLVTVSS

SEQ ID NO: 505 - protein, 119 aa, synthetic construct; identical to SEQ ID NO: 273
  REGION 1..119: note = DOM1h-574-2 anti-TNFR1 dAb

SEQ ID NO: 506 - protein, 119 aa, synthetic construct
  REGION 1..119: note = DOM1h-574-4 anti-TNFR1 dAb
EVQLLESGGGLVQPGGSLRLSCAASGFTFVKYSMGWVRQAPGKGLEWVSQISNTGGHTYYADSVKGRFTISRDNSKNTLYLQMNSLRAEDTAVYYCAKYTGRWEPFEYWGQGTLVTVSS

SEQ ID NO: 507 - protein, 119 aa, synthetic construct
  REGION 1..119: note = DOM1h-574-72 anti-TNFR1 dAb
EVQLLESGGGLVQPGGSLRLSCAASGFTFVKYSMGWVRQAPGKGLEWVSQISNTADRTYYAHSVKGRFTISRDNSKNTLYLQMNSLRAEDTAVYYCAIYTGRWVPFEYWGQGTLVTVSS

SEQ ID NO: 508 - protein, 119 aa, synthetic construct
  REGION 1..119: note = DOM1h-574-109 anti-TNFR1 dAb
EVQLLESGGGLVQPGGSLRLSCAASGFTFVKYSMGWVRQAPGKGLEWVSQISDTADRTYYAHSVKGRFTISRDNSKNTLYLQMNSLRAEDTAVYYCAIYTGRWVPFEYWGQGTLVTVSS

SEQ ID NO: 509 - protein, 119 aa, synthetic construct
  REGION 1..119: note = DOM1h-574-132 anti-TNFR1 dAb
EVQLLESGGGLVQPGGSLRLSCAASGFTFVKYSMGWVRQAPGKGLEWVSQISDTADRTYYDHSVKGRFTISRDNSKNTLYLQMNSLRAEDTAVYYCAIYTGRWRPFEYWGQGTLVTVSS

SEQ ID NO: 510 - protein, 119 aa, synthetic construct
  REGION 1..119: note = DOM1h-574-135 anti-TNFR1 dAb
EVQLLESGGGLVQPGGSLRLSCAASGFTFVKYSMGWVRQAPGKGLEWVSQISDTADRTYYTHSVKGRFTISRDNSKNTLYLQMNSLRAEDTAVYYCAIYTGRWVPFEYWGQGTLVTVSS

SEQ ID NO: 511 - protein, 119 aa, synthetic construct
  REGION 1..119: note = DOM1h-574-138 anti-TNFR1 dAb
EVQLLESGGGLVQPGGSLRLSCAASGFTFFKYSMGWVRQAPGKGLEWVSQISDTADRTYYAHSVKGRFTISRDNSKNTLYLQMNSLRAEDTAVYYCAIYTGRWAPFEYWGQGTLVTVSS

SEQ ID NO: 512 - protein, 119 aa, synthetic construct
  REGION 1..119: note = DOM1h-574-156 anti-TNFR1 dAb
EVQLLESGGGLVQPGGSLRLSCAASGFTFFKYSMGWVRQAPGKGLEWVSQISDTADRTYYAHSVKGRFTISRDNSKNTLYLQMNSLRAEDTAVYYCAIYTGRWVPFEYWGQGTLVTVSS

SEQ ID NO: 513 - protein, 119 aa, synthetic construct
  REGION 1..119: note = DOM1h-574-162 anti-TNFR1 dAb
EVQLLESGGGLVQPGGSLRLSCAASGFTFFKYSMGWVRQAPGKGLEWVSQISDTADRTYYSHSVKGRFTISRDNSKNTLYLQMNSLRAEDTAVYYCAIYTGRWVPFEYWGQGTLVTVSS

SEQ ID NO: 514 - protein, 119 aa, synthetic construct
  REGION 1..119: note = DOM1h-574-180 anti-TNFR1 dAb
EVQLLESGGGLVQPGGSLRLSCAASGFTFVKYSMGWVRQAPGKGLEWVSQISDTADRTYYAHAVKGRFTISRDNSKNTLYLQMNSLRAEDTAVYYCAIYTGRWVPFEYWGQGTLVTVSS

SEQ ID NO: 515 - protein, 119 aa, synthetic construct
  REGION 1..119: note = DOM1h-574-14 anti-TNFR1 dAb
EVQLLESGGGLVQPGGSLRLSCAASGFTFVKYSMGWVRQAPGKGLEWVSQISNTGDRTYYADSVKGRFTISRDNSKNTLYLQMNSLRAEDTAVYYCAIYTGRWEPFDYWGQGTLVTVSS

SEQ ID NO: 516 - protein, 119 aa, synthetic construct
  REGION 1..119: note = DOM1h-574-93 anti-TNFR1 dAb
EVQLLESGGGLVQPGGSLRLSCAASGFTFLKYSMGWVRQAPGKGLEWVSQISDTGDRRYYDDSVKGRFTISRDNSKNTLYLQMNSLRAEDTAVYYCAIYTGRWEPFVYWGQGTLVTVSS

SEQ ID NO: 517 - protein, 119 aa, synthetic construct
  REGION 1..119: note = DOM1h-574-123 anti-TNFR1 dAb
EVQLLESGGGLVQPGGSLRLSCAASGFTFVKYSMGWVRQAPGKGLEWVSQISNTADRRYYADAVKGRFTISRDNSKNTLYLQMNSLRAEDTAVYYCAIYTGRWEPFVYWGQGTLVTVSS

SEQ ID NO: 518 - protein, 119 aa, synthetic construct
  REGION 1..119: note = DOM1h-574-125 anti-TNFR1 dAb
EVQLLESGGGLVQPGGSLRLSCAASGFTFVKYSMGWVRQAPGKGLEWVSQIANTADRRYYADAVKGRFTISRDNSKNTLYLQMNSLRAEDTAVYYCAIYTGRWEPFVYWGQGTLVTVSS

SEQ ID NO: 519 - protein, 119 aa, synthetic construct
  REGION 1..119: note = DOM1h-574-126 anti-TNFR1 dAb
EVQLLESGGGLVQPGGSLRLSCAASGFTFVKYSMGWVRQAPGKGLEWVSQIANTGDRRYYAHAVKGRFTISRDNSKNTLYLQMNSLRAEDTAVYYCAIYTGRWEPFVYWGQGTLVTVSS

SEQ ID NO: 520 - protein, 119 aa, synthetic construct
  REGION 1..119: note = DOM1h-574-129 anti-TNFR1 dAb
EVQLLESGGGLVQPGGSLRLSCAASGFTFVKYSMGWVRQAPGKGLEWVSQIVNTGDRRYYADAVKGRFTISRDNSKNTLYLQMNSLRAEDTAVYYCAIYTGRWEPFVYWGQGTLVTVSS

SEQ ID NO: 521 - protein, 119 aa, synthetic construct
  REGION 1..119: note = DOM1h-574-133 anti-TNFR1 dAb
EVQLLESGGGLVQPGGSLRLSCAASGFTFVKYSMGWVRQAPGKGLEWVSQISDTADRTYYDHSVKGRFTISRDNSKNTLYLQMNSLRAEDTAVYYCAIYTGRWEPFVYWGQGTLVTVSS

SEQ ID NO: 522 - protein, 119 aa, synthetic construct
  REGION 1..119: note = DOM1h-574-137 anti-TNFR1 dAb
EVQLLESGGGLVQPGGSLRLSCAASGFTFVKYSMGWVRQAPGKGLEWVSQISDTADRTYYTDAVKGRFTISRDNSKNTLYLQMNSLRAEDTAVYYCAIYTGRWEPFVYWGQGTLVTVSS

SEQ ID NO: 523 - protein, 119 aa, synthetic construct
  REGION 1..119: note = DOM1h-574-160 anti-TNFR1 dAb
EVQLLESGGGLVQPGGSLRLSCAASGFTFLKYSMGWVRQAPGKGLEWVSQISDTADRTYYDHSVKGRFTISRDNSKNTLYLQMNSLRAEDTAVYYCAIYTGRWEPFVYWGQGTLVTVSS

SEQ ID NO: 524 - protein, 119 aa, synthetic construct
  REGION 1..119: note = DOM1h-574-139 anti-TNFR1 dAb
EVQLLESGGGLVQPGGSLRLSCAASGFTFLKYSMGWVRQAPGKGLEWVSQISDTADRTYYAHSVKGRFTISRDNSKNTLYLQMNSLRAEDTAVYYCAIYTGRWAPFEYWGQGTLVTVSS

SEQ ID NO: 525 - protein, 119 aa, synthetic construct
  REGION 1..119: note = DOM1h-574-155 anti-TNFR1 dAb
EVQLLESGGGLVQPGGSLRLSCAASGFTFLKYSMGWVRQAPGKGLEWVSQISDTADRTYYAHSVKGRFTISRDNSKNTLYLQMNSLRAEDTAVYYCAIYTGRWVPFEYWGQGTLVTVSS

SEQ ID NO: 526 - protein, 120 aa, synthetic construct
  REGION 1..120: note = DOM1h-509 anti-TNFR1 dAb
EVQLLESGGGLVQPGGSLRLSCAASGFTFSQYRMHWVRQAPGKSLEWVSSIDTRGSSTYYADPVKGRFTISRDNSKNTLYLQMNSLRAEDTAVYYCAKAVTMFSPFFDYWGQGTLVTVSS

SEQ ID NO: 527 - protein, 123 aa, synthetic construct
  REGION 1..123: note = DOM1h-510 anti-TNFR1 dAb
EVQLLESGGGLVQPGGSLRLSCAASGFTFADYGMRWVRQAPGKGLEWVSSITRTGRVTYYADSVKGRFTISRDNSKNTLYLQMNSLRAEDTAVYYCAKWRNRHGEYLADFDYWGQGTLVTVSS

SEQ ID NO: 528 - protein, 120 aa, synthetic construct
  REGION 1..120: note = DOM1h-543 anti-TNFR1 dAb
EVQLLESGGGLVQPGGSLRLSCAASGFTFMRYRMHWVRQAPGKGLEWVSSIDSNGSSTYYADSVKGRFTISRDNSKNTLYLQMNSLRAEDTAVYYCAKDRTERSPVFDYWGQGTLVTVSS

SEQ ID NO: 529 - protein, 119 aa, synthetic construct; identical to SEQ ID NO: 58
  REGION 1..119: note = DOM1h-549 anti-TNFR1 dAb

SEQ ID NO: 530 - protein, 119 aa, synthetic construct
  REGION 1..119: note = DOM1h-574-7 anti-TNFR1 dAb
EVQLLESGGGLVQPGGSLRLSCAASGFTFVKYSMGWVRQAPGKGLEWVSQISNTGGHTYYADSVKGRFTISRDNSKNTLYLQMNSLRAEDTAVYYCAIYTGRWEPFDYWGQGTLVTVSS

SEQ ID NO: 531 - protein, 119 aa, synthetic construct
  REGION 1..119: note = DOM1h-574-8 anti-TNFR1 dAb
EVQLLESGGGLVQPGGSLRLSCAASGFTFVKYSMGWVRQAPGKGPEWVSQISNTGGHTYYADSVKGRFTISRDNSKNTLYLQMNSLRAEDTAVYYCAIYTGRWEPFDYWGQGTLVTVSS

SEQ ID NO: 532 - protein, 119 aa, synthetic construct
  REGION 1..119: note = DOM1h-574-9 anti-TNFR1 dAb
EVQLLESGGGLVQPGGSLRLSCAASGFTFVKYSMGWVRQAPGKGLEWVSQISNTGGHTYYADSVKGRFTISRDNSKNTLYMQMNSLRAEDTAVYYCAIYTGRWEPFDYWGQGTLVTVSS

SEQ ID NO: 533 - protein, 119 aa, synthetic construct
  REGION 1..119: note = DOM1h-574-10 anti-TNFR1 dAb
EVQLLESGGGLVQPGGSLRLSCAASGFTFGKYSMGWVRQAPGKDLEWVSQISNTGGHTYYADSVKGRFTISRDNSKNTLYLQMNSLRAEDTAVYYCAIYTGRWEPFDYWGQGTLVTVSS

SEQ ID NO: 534 - protein, 119 aa, synthetic construct
  REGION 1..119: note = DOM1h-574-11 anti-TNFR1 dAb
EVQLLESGGGLVQPGGSLRLSCAASGFTFVKYSMGWVRQAPGKGLEWVSQISNTGGHTYYADSVKGRFTISRDNSKNTLYLQMNSLRAEDTAVYYCAKYTGRWEPFDHWGQGTLVTVSS

SEQ ID NO: 535 - protein, 119 aa, synthetic construct
  REGION 1..119: note = DOM1h-574-12 anti-TNFR1 dAb
EVQLLESGGGLVQPGGSLRLSCAASGFTFVKYSMGWVRQAPGKGLEWVSQISNTGDHTYYADSVKGRFTISRDNSKNTLYLQMNSLRAEDTAVYYCAKYTGRWEPFDYWGQGTLVTVSS

SEQ ID NO: 536 - protein, 119 aa, synthetic construct
  REGION 1..119: note = DOM1h-574-13 anti-TNFR1 dAb
EVQLLESGGGLVQPGGSLRLSCAASGFTFVKYSMGWVRQAPGKGLEWVSQISNTGDRTYYADSVKGRFTISRDNSKNTLYLQMNSLRAEDTAVYYCAKYTGRWEPFDYWGQGTLVTVSS

SEQ ID NO: 537 - protein, 119 aa, synthetic construct
  REGION 1..119: note = DOM1h-574-15 anti-TNFR1 dAb
EVQLLESGGGLVQPGGSLRLSCAASGFTFVKYSMGWVRQAPGKGLEWVSQISNTGDHTYYADSVKGRFTISRDNSKNTLYLQMNSLRAEDTAVYYCAIYTGRWEPFDYWGQGTLVTVSS

SEQ ID NO: 538 - protein, 119 aa, synthetic construct; identical to SEQ ID NO: 57
  REGION 1..119: note = DOM1h-574-16 anti-TNFR1 dAb

SEQ ID NO: 539 - protein, 119 aa, synthetic construct
  REGION 1..119: note = DOM1h-574-17 anti-TNFR1 dAb
EVQLLESGGGLVQPGGSLRLSCAASGFTFVKYSMGWVRQAPGKGPEWVSQISNTGDHTYYADSVKGRFTISRDNSKNTLYLQMNSLRAEDTAVYYCAIYTGRWEPFDYWGQGTLVTVSS

SEQ ID NO: 540 - protein, 119 aa, synthetic construct
  REGION 1..119: note = DOM1h-574-18 anti-TNFR1 dAb
EVQLLESGGGLVQPGGSLRLSCAASGFTFGKYSMGWVRQAPGKDLEWVSQISNTGDRTYYADSVKGRFTISRDNSKNTLYLQMNSLRAEDTAVYYCAIYTGRWEPFDYWGQGTLVTVSS

SEQ ID NO: 541 - protein, 119 aa, synthetic construct
  REGION 1..119: note = DOM1h-574-19 anti-TNFR1 dAb
EVQLLESGGGLVQPGGSLRLSCAASGFTFGKYSMGWVRQAPGKDLEWVSQISNTGDHTYYADSVKGRFTISRDNSKNTLYLQMNSLRAEDTAVYYCAIYTGRWEPFDYWGQGTLVTVSS

SEQ ID NO: 542 - protein, 119 aa, synthetic construct
  REGION 1..119: note = DOM1h-574-25 anti-TNFR1 dAb
EVQLLESGGGLVQPGGSLRLSCAASGFTFVKYSMGWVRQAPGKGLEWVSQISNTGDRTYYADSVKGRFTISRDNSKNTLYLQMNSLRAEDTAVYYCAIYTGRWEPFVYWGQGTLVTVSS

SEQ ID NO: 543 - protein, 119 aa, synthetic construct
  REGION 1..119: note = DOM1h-574-26 anti-TNFR1 dAb
EVQLLESGGGLVQPGGSLRLSCAASGFTFVKYSMGWVRQAPGKGLEWVSQISNTGDRTYYADSVKGRFTISRDNSKNTLYLQMNSLRAEDTAVYYCAIYTGRWEPFEYWGQGTLVTVSS

SEQ ID NO: 544 - protein, 119 aa, synthetic construct
  REGION 1..119: note = DOM1h-574-27 anti-TNFR1 dAb
EVQLLESGGGLVQPGGSLRLSCAASGFTFVKYSMGWVRQAPGKGLEWVSQISNTGDRTYYADSVKGRFTISRDNSKNTLYLQMNSLRAEDTAVYYCAIYTGRWKPFEYWGQGTLVTVSS

SEQ ID NO: 545 - protein, 119 aa, synthetic construct
  REGION 1..119: note = DOM1h-574-28 anti-TNFR1 dAb
EVQLLESGGGLVQPGGSLRLSCAASGFTFVKYSMGWVRQAPGKGLEWVSQISNTGDRTYYADSVKGRFTISRDNSKNTLYLQMNSLRAEDTAVYYCAIYTGRWVPFEYWGQGTLVTVSS

SEQ ID NO: 546 - protein, 119 aa, synthetic construct
  REGION 1..119: note = DOM1h-574-29 anti-TNFR1 dAb
EVQLLESGGGLVQPGGSLRLSCAASGFTFVKYSMGWVRQAPGKGLEWVSQISNTGDRTYYADSVKGRFTISRDNSKNTLYLQMNSLRAEDTAVYYCAIYTGRWRPFEYWGQGTLVTVSS

SEQ ID NO: 547 - protein, 119 aa, synthetic construct
  REGION 1..119: note = DOM1h-574-30 anti-TNFR1 dAb
EVQLLESGGGLVQPGGSLRLSCAASGFTFVKYSMGWVRQAPGKGLEWVSQIANTGDRRYYADSVKGRFTISRDNSKNTLYLQMNSLRAEDTAAYYCAIYTGRWEPFDYWGQGTLVTVSS

SEQ ID NO: 548 - protein, 119 aa, synthetic construct
  REGION 1..119: note = DOM1h-574-31 anti-TNFR1 dAb
EVQLLESGGGLVQPGGSLRLSCAASGFTFVKYSMGWVRQAPGKGLEWVSQISNTADRTYYAHSVKGRFTISRDNSKNTLYLQMNSLRAEDTAVYYCAIYTGRWEPFNYWGQGTLVTVSS

SEQ ID NO: 549 - protein, 119 aa, synthetic construct
  REGION 1..119: note = DOM1h-574-32 anti-TNFR1 dAb
EVQLLESGGGLVQPGGSLRLSCAASGFTFVKYSMGWVRQAPGKGLEWVSQISNTGDRTYYADSVKGRFTISRDNSKNTLYLQMNSLRAEDTAVYYCAIYTGRWAPFEYWGQGTLVTVSS

SEQ ID NO: 550 - protein, 119 aa, synthetic construct
  REGION 1..119: note = DOM1h-574-33 anti-TNFR1 dAb
EVQLLESGGGLVQPGGSLRLSCAASGFTFVKYSMGWVRQAPGKGLEWVSQISNTGDRTYYADSVKGRFTISRDNSKNSLYLQMNSLRAEDTAVYYCAIYTGRWVPFDNWGQGTLVTVSS

SEQ ID NO: 551 - protein, 119 aa, synthetic construct
  REGION 1..119: note = DOM1h-574-35 anti-TNFR1 dAb
EVQLLESGGGLVQPGGSLRLSCAASGFTFITYSMGWVRQAPGKGLEWVSQISNTGDRTYYADSVKGRFTISRDNSKNTLYLQMNSLRAEDTAVYYCAIYTGRWEPFQYWGQGTLVTVSS

SEQ ID NO: 552 - protein, 119 aa, synthetic construct
  REGION 1..119: note = DOM1h-574-36 anti-TNFR1 dAb
EVQLLESGGGLVQPGGSLRLSCAASGFTFGKYSMGWVRQAPGKGLEWVSQISNTGDRTYYADSVKGRFTISRDNSKNTLYLQMNSLRAEDTAVYYCAIYTGRWEPFDYWGQGTLVTVSS

SEQ ID NO: 553 - protein, 119 aa, synthetic construct
  REGION 1..119: note = DOM1h-574-37 anti-TNFR1 dAb
EVQLLESGGGLVQPGGSLRLSCAASGFTFFKYSMGWVRQAPGKGLEWVSQISNTGDRTYYADSVKGRFTISRDNSKNTLYLQMNSLRAEDTAVYYCAIYTGRWEPFDYWGQGTLVTVSS

SEQ ID NO: 554 - protein, 119 aa, synthetic construct
  REGION 1..119: note = DOM1h-574-38 anti-TNFR1 dAb
EVQLLESGGGLVQPGGSLRLSCAASGFTFVKYSMGWVRQAPGKGLEWVSQISDTGDRRYYDDSVKGRFTISRDNSKNTLYLQMNSLRAEDTAVYYCAIYTGRWEPFDYWGQGTLVTVSS

SEQ ID NO: 555 - protein, 119 aa, synthetic construct
  REGION 1..119: note = DOM1h-574-39 anti-TNFR1 dAb
EVQLLESGGGLVQPGGSLRLSCAASGFTFVKYSMGWVRQAPGKGLEWVSQISNTGDRRYYADAVKGRFTISRDNSKNTLYLQMNSLRAEDTAVYYCAIYTGRWEPFDYWGQGTLVTVSS

SEQ ID NO: 556 - protein, 119 aa, synthetic construct
  REGION 1..119: note = DOM1h-574-40 anti-TNFR1 dAb
EVQLLESGGGLVQPGGSLRLSCAASGFTFVKYSMGWVRQAPGKGLEWVSQISNTGDRTYYADSVKGRFTISRDNSKNTLYLQMNSLRAEDTAVYYCAIYTGRWEPFKYWGQGTLVTVSS

SEQ ID NO: 557 - protein, 119 aa, synthetic construct
  REGION 1..119: note = DOM1h-574-53 anti-TNFR1 dAb
EVQLLESGGGLVQPGGSLRLSCAASGFTFSKYSMGWVRQAPGKGLEWVSQISNTGERRYYADSVKGRFTISRDNPKNTLYLQMNSLRAEDTAVYYCAIYTGRWEPFEYWGQGTLVTVSS

SEQ ID NO: 558 - protein, 119 aa, synthetic construct
  REGION 1..119: note = DOM1h-574-54 anti-TNFR1 dAb
EVQLLESGGGLVQPGGSLRLSCAASGFTFVNYSMGWVRQAPGKGLEWVSQISNTGDRTYYADSVKGRFTISRDNSKNTLYLQMNSLRAEDTAVYYCAIYTGRWEPYEYWGQGTLVTVTS

SEQ ID NO: 559 - protein, 119 aa, synthetic construct
  REGION 1..119: note = DOM1h-574-65 anti-TNFR1 dAb
EVQLLESGGGLVQPGGSLRLSCAASGFTFVKYSMGWVRQAPGKGLEWVSQIANTGDRRYYADSVKGRFTISRDNSKNTLYLQMNSLRAEDTAVYYCAIYTGRWEPFVYWGQGTLVTVSS

SEQ ID NO: 560 - protein, 119 aa, synthetic construct
  REGION 1..119: note = DOM1h-574-66 anti-TNFR1 dAb
EVQLLESGGGLVQPGGSLRLSCAASGFTFVKYSMGWVRQAPGKGLEWVSQIANTGDRRYYADSVKGRFTISRDNSKNTLYLQMNSLRAEDTAVYYCAIYTGRWKPFEYWGQGTLVTVSS

SEQ ID NO: 561 - protein, 119 aa, synthetic construct
  REGION 1..119: note = DOM1h-574-67 anti-TNFR1 dAb
EVQLLESGGGLVQPGGSLRLSCAASGFTFVKYSMGWVRQAPGKGLEWVSQIANTGDRRYYADSVKGRFTISRDNSKNTLYLQMNSLRAEDTAVYYCAIYTGRWVPFEYWGQGTLVTVSS

SEQ ID NO: 562 - protein, 119 aa, synthetic construct
  REGION 1..119: note = DOM1h-574-68 anti-TNFR1 dAb
EVQLLESGGGLVQPGGSLRLSCAASGFTFVKYSMGWVRQAPGKGLEWVSQIANTGDRRYYADSVKGRFTISRDNSKNTLYLQMNSLRAEDTAVYYCAIYTGRWRPFEYWGQGTLVTVSS

SEQ ID NO: 563 - protein, 119 aa, synthetic construct
  REGION 1..119: note = DOM1h-574-69 anti-TNFR1 dAb
EVQLLESGGGLVQPGGSLRLSCAASGFTFVKYSMGWVRQAPGKGLEWVSQIANTGDRRYYADSVKGRFTISRDNSKNTLYLQMNSLRAEDTAVYYCAIYTGRWAPFEYWGQGTLVTVSS

SEQ ID NO: 564 - protein, 119 aa, synthetic construct
  REGION 1..119: note = DOM1h-574-70 anti-TNFR1 dAb
EVQLLESGGGLVQPGGSLRLSCAASGFTFVKYSMGWVRQAPGKGLEWVSQISNTADRTYYAHSVKGRFTISRDNSKNTLYLQMNSLRAEDTAVYYCAVYTGRWEPFVYWGQGTLVTVSS

SEQ ID NO: 565 - protein, 119 aa, synthetic construct
  REGION 1..119: note = DOM1h-574-71 anti-TNFR1 dAb
EVQLLESGGGLVQPGGSLRLSCAASGFTFVKYSMGWVRQAPGKGLEWVSQISNTADRTYYAHSVKGRFTISRDNSKNTLYLQMNSLRAEDTAVYYCAIYTGRWKPFEYWGQGTLVTVSS

SEQ ID NO: 566 - protein, 119 aa, synthetic construct
  REGION 1..119: note = DOM1h-574-73 anti-TNFR1 dAb
EVQLLESGGGLVQPGGSLRLSCAASGFTFVKYSMGWVRQAPGKGLEWVSQISNTADRTYYAHSVKGRFTISRDNSKNTLYLQMNSLRAEDTAVYYCAIYTGRWRPFEYWGQGTLVTVSS

SEQ ID NO: 567 - protein, 119 aa, synthetic construct
  REGION 1..119: note = DOM1h-574-74 anti-TNFR1 dAb
EVQLLESGGGLVQPGGSLRLSCAASGFTFVKYSMGWVRQAPGKGLEWVSQISNTADRTYYAHSVKGRFTISRDNSKNTLYLQMNSLRAEDTAVYYCAIYTGRWAPFEYWGQGTLVTVSS

SEQ ID NO: 568 - protein, 119 aa, synthetic construct
  REGION 1..119: note = DOM1h-574-75 anti-TNFR1 dAb
EVQLLESGGGLVQPGGSLRLSCAASGFTFVKYSMGWVRQAPGKGLEWVSQISDTGDRRYYDDSVKGRFTISRDNSKNTLYLQMNSLRAEDTAVYYCAIYTGRWEPFVYWGQGTLVTVSS

SEQ ID NO: 569 - protein, 119 aa, synthetic construct
  REGION 1..119: note = DOM1h-574-76 anti-TNFR1 dAb
EVQLLESGGGLVQPGGSLRLSCAASGFTFVKYSMGWVRQAPGKGLEWVSQISDTGDRRYYDDSVKGRFTISRDNSKNTLYLQMNSLRAEDTAVYYCAIYTGRWKPFEYWGQGTLVTVSS

SEQ ID NO: 570 - protein, 119 aa, synthetic construct
  REGION 1..119: note = DOM1h-574-77 anti-TNFR1 dAb
EVQLLESGGGLVQPGGSLRLSCAASGFTFVKYSMGWVRQAPGKGLEWVSQISDTGDRRYYDDSVKGRFTISRDNSKNTLYLQMNSLRAEDTAVYYCAIYTGRWVPFEYWGQGTLVTVSS

SEQ ID NO: 571 - protein, 119 aa, synthetic construct
  REGION 1..119: note = DOM1h-574-78 anti-TNFR1 dAb
EVQLLESGGGLVQPGGSLRLSCAASGFTFVKYSMGWVRQAPGKGLEWVSQISDTGDRRYYDDSVKGRFTISRDNSKNTLYLQMNSLRAEDTAVYYCAIYTGRWRPFEYWGQGTLVTVSS

SEQ ID NO: 572 - protein, 119 aa, synthetic construct
  REGION 1..119: note = DOM1h-574-79 anti-TNFR1 dAb
EVQLLESGGGLVQPGGSLRLSCAASGFTFVKYSMGWVRQAPGKGLEWVSQISDTGDRRYYDDSVKGRFTISRDNSKNTLYLQMNSLRAEDTAVYYCAIYTGRWAPFEYWGQGTLVTVSS

SEQ ID NO: 573 - protein, 119 aa, synthetic construct
  REGION 1..119: note = DOM1h-574-84 anti-TNFR1 dAb
EVQLLESGGGLVQPGGSLRLSCAASGFTFVKYSMGWVRQAPGKGLEWVSQISNTGDRRYYADAVKGRFTISRDNSKNTLYLQMNSLRAEDTAVYYCAIYTGRWEPFVYWGQGTLVTVSS

SEQ ID NO: 574 - protein, 119 aa, synthetic construct
  REGION 1..119: note = DOM1h-574-85 anti-TNFR1 dAb
EVQLLESGGGLVQPGGSLRLSCAASGFTFVKYSMGWVRQAPGKGLEWVSQISNTGDRRYYADAVKGRFTISRDNSKNTLYLQMNSLRAEDTAVYYCAIYTGRWKPFEYWGQGTLVTVSS

SEQ ID NO: 575 - protein, 119 aa, synthetic construct
  REGION 1..119: note = DOM1h-574-86 anti-TNFR1 dAb
EVQLLESGGGLVQPGGSLRLSCAASGFTFVKYSMGWVRQAPGKGLEWVSQISNTGDRRYYADAVKGRFTISRDNSKNTLYLQMNSLRAEDTAVYYCAIYTGRWVPFEYWGQGTLVTVSS

SEQ ID NO: 576 - protein, 119 aa, synthetic construct
  REGION 1..119: note = DOM1h-574-87 anti-TNFR1 dAb
EVQLLESGGGLVQPGGSLRLSCAASGFTFVKYSMGWVRQAPGKGLEWVSQISNTGDRRYYADAVKGRFTISRDNSKNTLYLQMNSLRAEDTAVYYCAIYTGRWRPFEYWGQGTLVTVSS

SEQ ID NO: 577 - protein, 119 aa, synthetic construct
  REGION 1..119: note = DOM1h-574-88 anti-TNFR1 dAb
EVQLLESGGGLVQPGGSLRLSCAASGFTFVKYSMGWVRQAPGKGLEWVSQISNTGDRRYYADAVKGRFTISRDNSKNTLYLQMNSLRAEDTAVYYCAIYTGRWAPFEYWGQGTLVTVSS

SEQ ID NO: 578 - protein, 119 aa, synthetic construct
  REGION 1..119: note = DOM1h-574-90 anti-TNFR1 dAb
EVQLLESGGGLVQPGGSLRLSCAASGFTFLKFSMGWVRQAPGKGLEWVSQIANTGDRRYYADSVKGRFTISRDNSKNTLYLQMNSLRAEDTAVYYCAIYTGRWAPFEYWGQGTLVTVSS

SEQ ID NO: 579 - protein, 119 aa, synthetic construct
  REGION 1..119: note = DOM1h-574-91 anti-TNFR1 dAb
EVQLLESGGGLVQPGGSLRLSCAASGFTFLKYSMGWVRQAPGKGLEWVSQISNTADRTYYAHSVKGRFTISRDNSKNTLYLQMNSLRAEDTAVYYCAIYTGRWAPFEYWGQGTLVTVSS

SEQ ID NO: 580 - protein, 119 aa, synthetic construct
  REGION 1..119: note = DOM1h-574-92 anti-TNFR1 dAb
EVQLLESGGGLVQPGGSLRLSCAASGFTFFKYSMGWVRQAPGKGLEWVSQISDTGDRRYYDDSVKGRFTISRDNSKNTLYLQMNSLRAEDTAVYYCAIYTGRWEPFVYWGQGTLVTVSS

SEQ ID NO: 581 - protein, 119 aa, synthetic construct
  REGION 1..119: note = DOM1h-574-94 anti-TNFR1 dAb
EVQLLESGGGLVQPGGSLRLSCAASGFTFVKYSMGWVRQAPGKGLEWVSQIANTGDRRYYADSVKGRFTISRDNSKNTLYLQMNSLRAEDTAAYYCAIYTGRWPDFDYWGQGTLVTVSS

SEQ ID NO: 582 - protein, 119 aa, synthetic construct
  REGION 1..119: note = DOM1h-574-95 anti-TNFR1 dAb
EVQLLESGGGLVQPGGSLRLSCAASGFTFVKYSMGWVRQAPGKGLEWVSQIANTGDRRYYADSVKGRFTISRDNSKNTLYLQMNSLRAEDTAAYYCAIYTGRWPDFEYWGQGTLVTVSS

SEQ ID NO: 583 - protein, 119 aa, synthetic construct
  REGION 1..119: note = DOM1h-574-96 anti-TNFR1 dAb
EVQLLESGGGLVQPGGSLRLSCAASGFTFVKYSMGWVRQAPGKGLEWVSQISNTADRTYYAHSVKGRFTISRDNSKNTLYLQMNSLRAEDTAVYYCAIYTGRWPDFDYWGQGTLVTVSS

SEQ ID NO: 584 - protein, 119 aa, synthetic construct
  REGION 1..119: note = DOM1h-574-97 anti-TNFR1 dAb
EVQLLESGGGLVQPGGSLRLSCAASGFTFVKYSMGWVRQAPGKGLEWVSQISNTADRTYYAHSVKGRFTISRDNSKNTLYLQMNSLRAEDTAVYYCAIYTGRWPDFEYWGQGTLVTVSS

SEQ ID NO: 585 - protein, 119 aa, synthetic construct
  REGION 1..119: note = DOM1h-574-98 anti-TNFR1 dAb
EVQLLESGGGLVQPGGSLRLSCAASGFTFVKYSMGWVRQAPGKGLEWVSQISDTGDRRYYDDSVKGRFTISRDNSKNTLYLQMNSLRAEDTAVYYCAIYTGRWPDFDYWGQGTLVTVSS

SEQ ID NO: 586 - protein, 119 aa, synthetic construct
  REGION 1..119: note = DOM1h-574-99 anti-TNFR1 dAb
EVQLLESGGGLVQPGGSLRLSCAASGFTFVKYSMGWVRQAPGKGLEWVSQISDTGDRRYYDDSVKGRFTISRDNSKNTLYLQMNSLRAEDTAVYYCAIYTGRWPDFEYWGQGTLVTVSS

SEQ ID NO: 587 - protein, 119 aa, synthetic construct
  REGION 1..119: note = DOM1h-574-100 anti-TNFR1 dAb
EVQLLESGGGLVQPGGSLRLSCAASGFTFVKYSMGWVRQAPGKGPEWVSQISAWGDRTYYADSVKGRFTISRDNSKNTLYLQMNSLRAEDTAVYYCAIYTGRWEPFDYWGQGTLVTVSS

SEQ ID NO: 588 - protein, 119 aa, synthetic construct
  REGION 1..119: note = DOM1h-574-101 anti-TNFR1 dAb
EVQLLESGGGLVQPGGSLRLSCAASGFTFVKYSMGWVRQAPGKGPEWVSQISDGGQRTYYADSVKGRFTISRDNSKNTLYLQMNSLRAEDTAVYYCAIYTGRWEPFDYWGQGTLVTVSS

SEQ ID NO: 589 - protein, 119 aa, synthetic construct
  REGION 1..119: note = DOM1h-574-102 anti-TNFR1 dAb
EVQLLESGGGLVQPGGSLRLSCAASGFTFVKYSMGWVRQAPGKGPEWVSQISDSGYRTYYADSVKGRFTISRDNSKNTLYLQMNSLRAEDTAVYYCAIYTGRWEPFDYWGQGTLVTVSS

SEQ ID NO: 590 - protein, 119 aa, synthetic construct
  REGION 1..119: note = DOM1h-574-103 anti-TNFR1 dAb
EVQLLESGGGLVQPGGSLRLSCAASGFTFVKYSMGWVRQAPGKGPEWVSQISDGGTRTYYADSVKGRFTISRDNSKNTLYLQMNSLRAEDTAVYYCAIYTGRWEPFDYWGQGTLVTVSS

SEQ ID NO: 591 - protein, 119 aa, synthetic construct
  REGION 1..119: note = DOM1h-574-104 anti-TNFR1 dAb
EVQLLESGGGLVQPGGSLRLSCAASGFTFVKYSMGWVRQAPGKGPEWVSQISDKGTRTYYADSVKGRFTISRDNSKNTLYLQMNSLRAEDTAVYYCAIYTGRWEPFDYWGQGTLVTVSS

SEQ ID NO: 592 - protein, 119 aa, synthetic construct
  REGION 1..119: note = DOM1h-574-105 anti-TNFR1 dAb
EVQLLESGGGLVQPGGSLRLSCAASGFTFVKYSMGWVRQAPGKGPEWVSQISETGRRTYYADSVKGRFTISRDNSKNTLYLQMNSLRAEDTAVYYCAIYTGRWEPFDYWGQGTLVTVSS

SEQ ID NO: 593 - protein, 119 aa, synthetic construct
  REGION 1..119: note = DOM1h-574-106 anti-TNFR1 dAb
EVQLLESGGGLVQPGGSLRLSCAASGFTFVKYSMGWVRQAPGKGLEWVSQINNTGSTTYYADSVKGRFTISRDNSKNTLYLQMNSLRAEDTAVYYCAIYTGRWEPFDYWGQGTLVTVSS

SEQ ID NO: 594 - protein, 119 aa, synthetic construct
  REGION 1..119: note = DOM1h-574-107 anti-TNFR1 dAb
EVQLLESGGGLVQPGGSLRLSCAASGFTFVKYSMGWVRQAPGKGPEWVSQISNTADRTYYAHSVKGRFTISRDNSKNTLYLQMNSLRAEDTAVYYCAIYTGRWVPFEYWGQGTLVTVSS

SEQ ID NO: 595 - protein, 119 aa, synthetic construct
  REGION 1..119: note = DOM1h-574-108 anti-TNFR1 dAb
EVQLLESGGGLVQPGGSLRLSCAASGFTFVKYSMGWVRQAPGKGPEWVSQISNTADRTYYAHSVKGRFTISRDNSKNTLYLQMNSLRAEDTAVYYCAIYTGRWAPFEYWGQGTLVTVSS

SEQ ID NO: 596 - protein, 119 aa, synthetic construct
  REGION 1..119: note = DOM1h-574-110 anti-TNFR1 dAb
EVQLLESGGGLVQPGGSLRLSCAASGFTFVKYSMGWVRQAPGKGLEWVSQISDTADRTYYAHSVKGRFTISRDNSKNTLYLQMNSLRAEDTAVYYCAIYTGRWAPFEYWGQGTLVTVSS

SEQ ID NO: 597 - protein, 119 aa, synthetic construct
  REGION 1..119: note = DOM1h-574-111 anti-TNFR1 dAb
EVQLLESGGGLVQPGGSLRLSCAASGFTFVKYSMGWVRQAPGKGLEWVSQISDTADRTYYDDSVKGRFTISRDNSKNTLYLQMNSLRAEDTAVYYCAIYTGRWRPFEYWGQGTLVTVSS

SEQ ID NO: 598 - protein, 119 aa, synthetic construct
  REGION 1..119: note = DOM1h-574-112 anti-TNFR1 dAb
EVQLLESGGGLVQPGGSLRLSCAASGFTFVKYSMGWVRQAPGKGLEWVSQISDTADRTYYTHSVKGRFTISRDNSKNTLYLQMNSLRAEDTAVYYCAIYTGRWAPFEYWGQGTLVTVSS

SEQ ID NO: 599 - protein, 119 aa, synthetic construct
  REGION 1..119: note = DOM1h-574-113 anti-TNFR1 dAb
EVQLLESGGGLVQPGGSLRLSCAASGFTFVKYSMGWVRQAPGKGLEWVSQISNTADRRYYAHSVKGRFTISRDNSKNTLYLQMNSLRAEDTAVYYCAIYTGRWAPFEYWGQGTLVTVSS

SEQ ID NO: 600 - protein, 119 aa, synthetic construct
  REGION 1..119: note = DOM1h-574-114 anti-TNFR1 dAb
EVQLLESGGGLVQPGGSLRLSCAASGFTFVKYSMGWVRQAPGKGLEWVSQILNTADRTYYDHSVKGRFTISRDNSKNTLYLQMNSLRAEDTAVYYCAIYTGRWAPFEYWGQGTLVTVSS

SEQ ID NO: 601 - protein, 119 aa, synthetic construct
  REGION 1..119: note = DOM1h-574-115 anti-TNFR1 dAb
EVQLLESGGGLVQPGGSLRLSCAASGFTFVKYSMGWVRQAPGKGLEWVSQISNTADRTYYDHSVKGRFTISRDNSKNTLYLQMNSLRAEDTAVYYCAIYTGRWAPFEYWGQGTLVTVSS

SEQ ID NO: 602 - protein, 119 aa, synthetic construct
  REGION 1..119: note = DOM1h-574-116 anti-TNFR1 dAb
EVQLLESGGGLVQPGGSLRLSCAASGFTFVKYSMGWVRQAPGKGLEWVSQISDTADRRYYAHSVKGRFTISRDNSKNTLYLQMNSLRAEDTAVYYCAIYTGRWAPFEYWGQGTLVTVSS

SEQ ID NO: 603 - protein, 119 aa, synthetic construct
  REGION 1..119: note = DOM1h-574-117 anti-TNFR1 dAb
EVQLLESGGGLVQPGGSLRLSCAASGFTFVKYSMGWVRQAPGKGLEWVSQISDTADRRYYDHSVKGRFTISRDNSKNTLYLQMNSLRAEDTAVYYCAIYTGRWAPFEYWGQGTLVTVSS

SEQ ID NO: 604 - protein, 119 aa, synthetic construct
  REGION 1..119: note = DOM1h-574-118 anti-TNFR1 dAb
EVQLLESGGGLVQPGGSLRLSCAASGFTFVKYSMGWVRQAPGKGLEWVSQISNTADRTYYAHSVKGRFTISRDNSKNTLYLQMNSLRAEDTAVYYCAVYTGRWVSFEYWGQGTLVTVSS

SEQ ID NO: 605 - protein, 119 aa, synthetic construct
  REGION 1..119: note = DOM1h-574-119 anti-TNFR1 dAb
EVQLLESGGGLVQPGGSLRLSCAASGFTFVKYSMGWVRQAPGKGLEWVSQISNTADRTYYAHSVKGRFTISRDNSKNTLYLQMNSLRAEDTAVYYCALYTGRWVSFEYWGQGTLVTVSS

SEQ ID NO: 606 - protein, 119 aa, synthetic construct
  REGION 1..119: note = DOM1h-574-120 anti-TNFR1 dAb
EVQLLESGGGLVQPGGSLRLSCAASGFTFVKYSMGWVRQAPGKGLEWVSQISNTADRTYYAHSVKGRFTISRDNSKNTLYLQMNSLRAEDTAVYYCAVYTGRWVPFEYWGQGTLVTVSS

SEQ ID NO: 607 - protein, 119 aa, synthetic construct
  REGION 1..119: note = DOM1h-574-121 anti-TNFR1 dAb
EVQLLESGGGLVQPGGSLRLSCAASGFTFVKYSMGWVRQAPGKGLEWVSQISNTADRTYYAHSVKGRFTISRDNSKNTLYLQMNSLRAEDTAVYYCALYTGRWVPFEYWGQGTLVTVSS

SEQ ID NO: 608 - protein, 119 aa, synthetic construct
  REGION 1..119: note = DOM1h-574-122 anti-TNFR1 dAb
EVQLLESGGGLVQPGGSLRLSCAASGFTFVKYSMGWVRQAPGKGLEWVSQIANTADRRYYAHSVKGRFTISRDNSKNTLYLQMNSLRAEDTAVYYCAIYTGRWAPFEYWGQGTLVTVSS

SEQ ID NO: 609 - protein, 119 aa, synthetic construct
  REGION 1..119: note = DOM1h-574-124 anti-TNFR1 dAb
EVQLLESGGGLVQPGGSLRLSCAASGFTFVKYSMGWVRQAPGKGLEWVSQISNTGDRRYYAHAVKGRFTISRDNSKNTLYLQMNSLRAEDTAVYYCAIYTGRWEPFVYWGQGTLVTVSS

SEQ ID NO: 610 - protein, 119 aa, synthetic construct
  REGION 1..119: note = DOM1h-574-127 anti-TNFR1 dAb
EVQLLESGGGLVQPGGSLRLSCAASGFTFVKYSMGWVRQAPGKGLEWVSQISNTADRRYYAHAVKGRFTISRDNSKNTLYLQMNSLRAEDTAVYYCAIYTGRWEPFVYWGQGTLVTVSS

SEQ ID NO: 611 - protein, 119 aa, synthetic construct
  REGION 1..119: note = DOM1h-574-128 anti-TNFR1 dAb
EVQLLESGGGLVQPGGSLRLSCAASGFTFVKYSMGWVRQAPGKGLEWVSQIANTADRRYYAHAVKGRFTISRDNSKNTLYLQMNSLRAEDTAVYYCAIYTGRWEPFVYWGQGTLVTVSS

SEQ ID NO: 612 - protein, 119 aa, synthetic construct
  REGION 1..119: note = DOM1h-574-130 anti-TNFR1 dAb
EVQLLESGGGLVQPGGSLRLSCAASGFTFVKYSMGWVRQAPGKGLEWVSQIANTGDRRYYADAVKGRFTISRDNSKNTLYLQMNSLRAEDTAVYYCAIYTGRWEPFVYWGQGTLVTVSS

SEQ ID NO: 613 - protein, 119 aa, synthetic construct
  REGION 1..119: note = DOM1h-574-131 anti-TNFR1 dAb
EVQLLESGGGLVQPGGSLRLSCAASGFTFVKYSMGWVRQAPGKGLEWVSQISDTADRTYYDHSVKGRFTISRDNSKNTLYLQMNSLRAEDTAVYYCAIYTGRWAPFEYWGQGTLVTVSS

SEQ ID NO: 614 - protein, 119 aa, synthetic construct
  REGION 1..119: note = DOM1h-574-134 anti-TNFR1 dAb
EVQLLESGGGLVQPGGSLRLSCAASGFTFVKYSMGWVRQAPGKGLEWVSQISDTADRTYYSHSVKGRFTISRDNSKNTLYLQMNSLRAEDTAVYYCAIYTGRWVPFEYWGQGTLVTVSS

SEQ ID NO: 615 - protein, 119 aa, synthetic construct
  REGION 1..119: note = DOM1h-574-140 anti-TNFR1 dAb
EVQLLESGGGLVQPGGSLRLSCAASGFTFFKYSMGWVRQAPGKGLEWVSQIADTGDRRYYDDSVKGRFTISRDNSKNTLYLQMNSLRAEDTAVYYCAIYTGRWEPFVYWGQGTLVTVSS

SEQ ID NO: 616 - protein, 119 aa, synthetic construct
  REGION 1..119: note = DOM1h-574-141 anti-TNFR1 dAb
EVQLLESGGGLVQPGGSLRLSCAASGFTFFKYSMGWVRQAPGKGLEWVSQISDTADRRYYDDSVKGRFTISRDNSKNTLYLQMNSLRAEDTAVYYCAIYTGRWEPFVYWGQGTLVTVSS

SEQ ID NO: 617 - protein, 119 aa, synthetic construct
  REGION 1..119: note = DOM1h-574-142 anti-TNFR1 dAb
EVQLLESGGGLVQPGGSLRLSCAASGFTFFKYSMGWVRQAPGKGLEWVSQISDTGDRRYYDHSVKGRFTISRDNSKNTLYLQMNSLRAEDTAVYYCAIYTGRWEPFVYWGQGTLVTVSS

SEQ ID NO: 618 - protein, 119 aa, synthetic construct
  REGION 1..119: note = DOM1h-574-143 anti-TNFR1 dAb
EVQLLESGGGLVQPGGSLRLSCAASGFTFFKYSMGWVRQAPGKGLEWVSQISDTGDRRYYDDAVKGRFTISRDNSKNTLYLQMNSLRAEDTAVYYCAIYTGRWEPFVYWGQGTLVTVSS

SEQ ID NO: 619 - protein, 119 aa, synthetic construct
  REGION 1..119: note = DOM1h-574-144 anti-TNFR1 dAb
EVQLLESGGGLVQPGGSLRLSCAASGFTFFKYSMGWVRQAPGKGLEWVSQIADTADRRYYDDSVKGRFTISRDNSKNTLYLQMNSLRAEDTAVYYCAIYTGRWEPFVYWGQGTLVTVSS

SEQ ID NO: 620 - protein, 119 aa, synthetic construct
  REGION 1..119: note = DOM1h-574-145 anti-TNFR1 dAb
EVQLLESGGGLVQPGGSLRLSCAASGFTFFKYSMGWVRQAPGKGLEWVSQIADTGDRRYYDHSVKGRFTISRDNSKNTLYLQMNSLRAEDTAVYYCAIYTGRWEPFVYWGQGTLVTVSS

SEQ ID NO: 621 - protein, 119 aa, synthetic construct
  REGION 1..119: note = DOM1h-574-146 anti-TNFR1 dAb
EVQLLESGGGLVQPGGSLRLSCAASGFTFFKYSMGWVRQAPGKGLEWVSQIADTGDRRYYDDAVKGRFTISRDNSKNTLYLQMNSLRAEDTAVYYCAIYTGRWEPFVYWGQGTLVTVSS

SEQ ID NO: 622 - protein, 119 aa, synthetic construct
  REGION 1..119: note = DOM1h-574-147 anti-TNFR1 dAb
EVQLLESGGGLVQPGGSLRLSCAASGFTFVKYSMGWVRQAPGKGLEWVSQISDTADRTYYAHSVKGRFTISRDNSKNTLYLQMNSLRAEDTAVYYCAIYTGRWGPFVYWGQGTLVTVSS

SEQ ID NO: 623 - protein, 119 aa, synthetic construct
  REGION 1..119: note = DOM1h-574-148 anti-TNFR1 dAb
EVQLLESGGGLVQPGGSLRLSCAASGFTFVKYSMGWVRQAPGKGLEWVSQISDTADRTYYAHSVKGRFTISRDNSKNTLYLQMNSLRAEDTAVYYCAIYTGRWVPFAYWGQGTLVTVSS

SEQ ID NO: 624 - protein, 119 aa, synthetic construct
  REGION 1..119: note = DOM1h-574-149 anti-TNFR1 dAb
EVQLLESGGGLVQPGGSLRLSCAASGFTFVKYSMGWVRQAPGKGLEWVSQISDTADRTYYAHSVKGRFTISRDNSKNTLYLQMNSLRAEDTAVYYCAIYTGRWGPFQYWGQGTLVTVSS

SEQ ID NO: 625 - protein, 119 aa, synthetic construct
  REGION 1..119: note = DOM1h-574-150 anti-TNFR1 dAb
EVQLLESGGGLVQPGGSLRLSCAASGFTFVKYSMGWVRQAPGKGLEWVSQISDTADRTYYAHSVKGRFTISRDNSKNTLYLQMNSLRAEDTAVYYCAIYTGRWEPFQYWGQGTLVTVSS

SEQ ID NO: 626 - protein, 119 aa, synthetic construct; identical to SEQ ID NO: 596
  REGION 1..119: note = DOM1h-574-151 anti-TNFR1 dAb

SEQ ID NO: 627 - protein, 119 aa, synthetic construct
  REGION 1..119: note = DOM1h-574-152 anti-TNFR1 dAb
EVQLLESGGGLVQPGGSLRLSCAASGFTFVKYSMGWVRQAPGKGLEWVSQISDTADRTYYAHSVKGRFTISRDNSKNTLYLQMNSLRAEDTAVYYCAIYTGRWAPFQYWGQGTLVTVSS

SEQ ID NO: 628 - protein, 119 aa, synthetic construct
  REGION 1..119: note = DOM1h-574-153 anti-TNFR1 dAb
EVQLLESGGGLVQPGGSLRLSCAASGFTFVKYSMGWVRQAPGKGLEWVSQISDTADRTYYAHSVKGRFTISRDNSKNTLYLQMNSLRAEDTAVYYCAIYTGRWVPFQYWGQGTLVTVSS

SEQ ID NO: 629 - protein, 119 aa, synthetic construct
  REGION 1..119: note = DOM1h-574-154 anti-TNFR1 dAb
EVQLLESGGGLVQPGGSLRLSCAASGFTFVKYSMGWVRQAPGKGLEWVSQISDTGDRRYYDHSVKGRFTISRDNSKNTLYLQMNSLRAEDTAVYYCAIYTGRWAPFEYWGQGTLVTVSS

SEQ ID NO: 630 - protein, 119 aa, synthetic construct
  REGION 1..119: note = DOM1h-574-157 anti-TNFR1 dAb
EVQLLESGGGLVQPGGSLRLSCAASGFTFLKYSMGWVRQAPGKGLEWVSQISDTADRTYYDHSVKGRFTISRDNSKNTLYLQMNSLRAEDTAVYYCAIYTGRWRPFEYWGQGTLVTVSS

SEQ ID NO: 631 - protein, 119 aa, synthetic construct
  REGION 1..119: note = DOM1h-574-158 anti-TNFR1 dAb
EVQLLESGGGLVQPGGSLRLSCAASGFTFFKYSMGWVRQAPGKGLEWVSQISDTADRTYYDHSVKGRFTISRDNSKNTLYLQMNSLRAEDTAVYYCAIYTGRWRPFEYWGQGTLVTVSS

SEQ ID NO: 632 - protein, 119 aa, synthetic construct
  REGION 1..119: note = DOM1h-574-159 anti-TNFR1 dAb
EVQLLESGGGLVQPGGSLRLSCAASGFTFFKYSMGWVRQAPGKGLEWVSQISDTADRTYYDHSVKGRFTISRDNSKNTLYLQMNSLRAEDTAVYYCAIYTGRWEPFVYWGQGTLVTVSS

SEQ ID NO: 633 - protein, 119 aa, synthetic construct
  REGION 1..119: note = DOM1h-574-161 anti-TNFR1 dAb
EVQLLESGGGLVQPGGSLRLSCAASGFTFLKYSMGWVRQAPGKGLEWVSQISDTADRTYYSHSVKGRFTISRDNSKNTLYLQMNSLRAEDTAVYYCAIYTGRWVPFEYWGQGTLVTVSS

SEQ ID NO: 634 - protein, 119 aa, synthetic construct
  REGION 1..119: note = DOM1h-574-163 anti-TNFR1 dAb
EVQLLESGGGLVQPGGSLRLSCAASGFTFFKYSMGWVRQAPGKGLEWVSQISDTADRTYYTHSVKGRFTISRDNSKNTLYLQMNSLRAEDTAVYYCAIYTGRWVPFEYWGQGTLVTVSS

SEQ ID NO: 635 - protein, 119 aa, synthetic construct
  REGION 1..119: note = DOM1h-574-164 anti-TNFR1 dAb
EVQLLESGGGLVQPGGSLRLSCAASGFTFLKYSMGWVRQAPGKGLEWVSQISDTADRTYYTHSVKGRFTISRDNSKNTLYLQMNSLRAEDTAVYYCAIYTGRWVPFEYWGQGTLVTVSS

SEQ ID NO: 636 - protein, 119 aa, synthetic construct; identical to SEQ ID NO: 511
  REGION 1..119: note = DOM1h-574-165 anti-TNFR1 dAb

SEQ ID NO: 637 - protein, 119 aa, synthetic construct; identical to SEQ ID NO: 524
  REGION 1..119: note = DOM1h-574-166 anti-TNFR1 dAb

SEQ ID NO: 638 - protein, 119 aa, synthetic construct
  REGION 1..119: note = DOM1h-574-167 anti-TNFR1 dAb
EVQLLESGGGLVQPGGSLRLSCAASGFTFLKYSMGWVRQAPGKGLEWVSQISDTGDRRYYDHSVKGRFTISRDNSKNTLYLQMNSLRAEDTAVYYCAIYTGRWAPFEYWGQGTLVTVSS

SEQ ID NO: 639 - protein, 119 aa, synthetic construct
  REGION 1..119: note = DOM1h-574-168 anti-TNFR1 dAb
EVQLLESGGGLVQPGGSLRLSCAASGFTFFKYSMGWVRQAPGKGLEWVSQISDTGDRRYYDHSVKGRFTISRDNSKNTLYLQMNSLRAEDTAVYYCAIYTGRWAPFEYWGQGTLVTVSS

SEQ ID NO: 640 - protein, 119 aa, synthetic construct
  REGION 1..119: note = DOM1h-574-169 anti-TNFR1 dAb
EVQLLESGGGLVQPGGSLRLSCAASGFTFVKYSMGWVRQAPGKGLEWVSQIADTADRTYYAHSVKGRFTISRDNSKNTLYLQMNSLRAEDTAVYYCAIYTGRWVPFEYWGQGTLVTVSS

SEQ ID NO: 641 - protein, 119 aa, synthetic construct
  REGION 1..119: note = DOM1h-574-170 anti-TNFR1 dAb
EVQLLESGGGLVQPGGSLRLSCAASGFTFFKYSMGWVRQAPGKGLEWVSQISDTADRTYYAHAVKGRFTISRDNSKNTLYLQMNSLRAEDTAVYYCAIYTGRWVPFEYWGQGTLVTVSS

SEQ ID NO: 642 - protein, 119 aa, synthetic construct
  REGION 1..119: note = DOM1h-574-171 anti-TNFR1 dAb
EVQLLESGGGLVQPGGSLRLSCAASGFTFVKYSMGWVRQAPGKGLEWVSQIADTADRTYYDHSVKGRFTISRDNSKNTLYLQMNSLRAEDTAVYYCAIYTGRWVPFEYWGQGTLVTVSS

SEQ ID NO: 643 - protein, 119 aa, synthetic construct
  REGION 1..119: note = DOM1h-574-172 anti-TNFR1 dAb
EVQLLESGGGLVQPGGSLRLSCAASGFTFVKYSMGWVRQAPGKGLEWVSQIADTADRTYYDHAVKGRFTISRDNSKNTLYLQMNSLRAEDTAVYYCAIYTGRWVPFEYWGQGTLVTVSS

SEQ ID NO: 644 - protein, 119 aa, synthetic construct
  REGION 1..119: note = DOM1h-574-173 anti-TNFR1 dAb
EVQLLESGGGLVQPGGSLRLSCAASGFTFVKYSMGWVRQAPGKGLEWVSQIADTADRRYYAHSVKGRFTISRDNSKNTLYLQMNSLRAEDTAVYYCAIYTGRWAPFEYWGQGTLVTVSS

SEQ ID NO: 645 - protein, 119 aa, synthetic construct
  REGION 1..119: note = DOM1h-574-174 anti-TNFR1 dAb
EVQLLESGGGLVQPGGSLRLSCAASGFTFVKYSMGWVRQAPGKGLEWVSQISDTADRRYYAHAVKGRFTISRDNSKNTLYLQMNSLRAEDTAVYYCAIYTGRWAPFEYWGQGTLVTVSS

SEQ ID NO: 646 - protein, 119 aa, synthetic construct
  REGION 1..119: note = DOM1h-574-175 anti-TNFR1 dAb
EVQLLESGGGLVQPGGSLRLSCAASGFTFVKYSMGWVRQAPGKGLEWVSQIADTADRRYYAHAVKGRFTISRDNSKNTLYLQMNSLRAEDTAVYYCAIYTGRWAPFEYWGQGTLVTVSS

SEQ ID NO: 647 - protein, 119 aa, synthetic construct
  REGION 1..119: note = DOM1h-574-176 anti-TNFR1 dAb
EVQLLESGGGLVQPGGSLRLSCAASGFTFVKYSMGWVRQAPGKGLEWVSQISDTADRRYYDHAVKGRFTISRDNSKNTLYLQMNSLRAEDTAVYYCAIYTGRWAPFEYWGQGTLVTVSS

SEQ ID NO: 648 - protein, 119 aa, synthetic construct
  REGION 1..119: note = DOM1h-574-177 anti-TNFR1 dAb
EVQLLESGGGLVQPGGSLRLSCAASGFTFVKYSMGWVRQAPGKGLEWVSQIADTADRRYYDHAVKGRFTISRDNSKNTLYLQMNSLRAEDTAVYYCAIYTGRWAPFEYWGQGTLVTVSS

SEQ ID NO: 649 - protein, 119 aa, synthetic construct
  REGION 1..119: note = DOM1h-574-178 anti-TNFR1 dAb
EVQLLESGGGLVQPGGSLRLSCAASGFTFVKYSMGWVRQAPGKGLEWVSQIADTADRRYYDHSVKGRFTISRDNSKNTLYLQMNSLRAEDTAVYYCAIYTGRWAPFEYWGQGTLVTVSS

SEQ ID NO: 650 - protein, 119 aa, synthetic construct
  REGION 1..119: note = DOM1h-574-179 anti-TNFR1 dAb
EVQLLESGGGLVQPGGSLRLSCAASGFTFFKYSMGWVRQAPGKGLEWVSQISDTADRRYYDDAVKGRFTITRDNSKNTLYLQMNSLRAEDTAVYYCAIYTGRWEPFVYWGQGTLVTVSS

SEQ ID NO: 651 - protein, 119 aa, synthetic construct
  REGION 1..119: note = DOM1h-574-188 anti-TNFR1 dAb
EVQLLESGGGLVQPGGSLRLSCAASGFTFDKYSMGWVRQAPGKGLEWVSQISDTADRTYYAHSVKGRFTISRDNSKNTLYLQMNSLRAEDTAVYYCAIYTGRWVPFEYWGQGTLVTVSS

SEQ ID NO: 652 - protein, 119 aa, synthetic construct
  REGION 1..119: note = DOM1h-574-189 anti-TNFR1 dAb
EVQLLESGGGLVQPGGSLRLSCAASGFTFFKYSMGWVRQAPGKGLEWVSQISDTADRTYYAHSVKGRFTISRDNSKNTLYLQMNSLRAEDTAVYYCAVYTGRWEPFEYWGQGTLVTVSS

SEQ ID NO: 653 - protein, 119 aa, synthetic construct
  REGION 1..119: note = DOM1h-574-190 anti-TNFR1 dAb
EVQLLESGGGLVQPGGSLRLSCAASGFTFFKYSMGWIRQAPGKGLEWVSQISDTADRTYYAHSVKGRFTISRDNSKNTLYLQMNSLRAEDTAVYYCAVYTGRWAPFEYWGQGTLVTVSS

SEQ ID NO: 654 - protein, 119 aa, synthetic construct
  REGION 1..119: note = DOM1h-574-191 anti-TNFR1 dAb
EVQLLESGGGLVQPGGSLRLSCAASGFTFSKYSMGWVRQAPGKGLEWVSQISDTADRTYYAHSVKGRFTISRDNSKNTLYLQMNSLRAEDTAVYYCAIYTGRWVPFEYWGQGTLVTVSS

SEQ ID NO: 655 - protein, 119 aa, synthetic construct
  REGION 1..119: note = DOM1h-574-192 anti-TNFR1 dAb
EVQLLESGGGLVQPGGSLRLSCAASGFTFSKYSMGWVRQAPGKGLEWVSQISDTADRTYYAHSVKGRFTISRDNSKNTLYLQMNSLRAEDTAVYYCAIYTGRWVPFENWGQGTLVTVSS

SEQ ID NO: 656 - protein, 119 aa, synthetic construct
  REGION 1..119: note = DOM1h-574-193 anti-TNFR1 dAb
EVQLLESGGGLVQPGGSLRLSCAASGFTFDKYSMGWVRQAPGKGPEWVSQISDTADRTYYAHSVKGRFTNSRDNSKNTLYLQMNSLRAEDTAVYYCAIYTGRWEPFEYWGQGTLVTVSS

SEQ ID NO: 657 - protein, 119 aa, synthetic construct; identical to SEQ ID NO: 514
  REGION 1..119: note = DOM1h-574-194 anti-TNFR1 dAb

SEQ ID NO: 658 - protein, 119 aa, synthetic construct
  REGION 1..119: note = DOM1h-574-195 anti-TNFR1 dAb
EVQLLESGGGLVQPGGSLRLSCAASGFTFFKYSMGWVRQAPGKGLEWVSQISDTADRTYYAHSVKGRFTISRDNSKNTLYLQMNSLRAEDTAVYYCAIYTGRWEPFEYWGQGTLVTVSS

SEQ ID NO: 659 - protein, 119 aa, synthetic construct
  REGION 1..119: note = DOM1h-574-196 anti-TNFR1 dAb
EVQLLESGGGLVQPGGSLRLSCAASGFTFSKYSMGWVRQAPGKGLEWVSQISDTADRTYYAHSVKGRFTISRDNSKNTLYLQMNSLRAEDTAVYYCAIYTGRWEPFEYWGQGTLVTVSS

SEQ ID NO: 660 - protein, 119 aa, synthetic construct
  REGION 1..119: note = DOM1h-574-201 anti-TNFR1 dAb
EVQLLESGGGLVQPGGSLRLSCAASGFTFDKNSMGWVRQAPGKGLEWVSQISDTADRTYYAHSLKGRFTISRDNSKNTLYLQMNSLRAEDTAVYYCAIYTGRWVPFEYWGQGTLVTVSS

SEQ ID NO: 661 - protein, 119 aa, synthetic construct
  REGION 1..119: note = DOM1h-574-202 anti-TNFR1 dAb
EVQLLESGGGLVQPGGSLRLSCAASGFTFFKYSMGWVRQAPGKGLEWVSQISDTADRTYYAHSVKGRFTISRDNSKNTLYLQMNSLRAEDTAVYYCAVYTGRWAPFEYWGQGTLVTVSS

SEQ ID NO: 662 - protein, 119 aa, synthetic construct
  REGION 1..119: note = DOM1h-574-203 anti-TNFR1 dAb
EVQLLESGGGLVQPGGSLRLSCAASGFTFFKYSMGWVRQAPGKGLEWVSQISDTADRTYYAHSVKGRFTISRDDSKNTLYLQMNSLRAEDTAVYYCAIYTGRWAPFEYWGQGTLVTVSS

SEQ ID NO: 663 - protein, 119 aa, synthetic construct
  REGION 1..119: note = DOM1h-574-204 anti-TNFR1 dAb
EVQLLESGGGLVQPGGSLRLSCAASGFTFFKYSMGWVRQAPGKGLEWVSQISDTADRTYYAHSVKGRFTISRDNSKNTLYLQMNSLRVEDTAVYYCAIYTGQWAPYEYWGQGTLVTVRA

SEQ ID NO: 664 - protein, 119 aa, synthetic construct
  REGION 1..119: note = DOM1h-574-205 anti-TNFR1 dAb
EVQLLESGGGLVQPGGSLRLSCAASGFTFDKYSMGWVRQAPGKDLEWVSQISDTADRTYYAHSVKGRFTISRDNSKNTLYLQMNSLRAEDTAVYYCAIYTGRWVPFENWGHGTLVTVSS

SEQ ID NO: 665 - protein, 119 aa, synthetic construct
  REGION 1..119: note = DOM1h-574-206 anti-TNFR1 dAb
EVQLLDSGGGLVQPGGSLRLSCAASGFTFFKYSMGWVRQAPGKGLEWVSQISDTADRTYYSPSVKGRFTISRDNSGNTLNLQMTPLRAEDTAVYYCAIYTGRWEPFEYWGQGTLVTVSS

SEQ ID NO: 666 - protein, 119 aa, synthetic construct
  REGION 1..119: note = DOM1h-574-207 anti-TNFR1 dAb
EVQLLESGGGMVQPGGSLRLSCASSGFTFSKYSMGWVRQAPGKGLEWVSQISDTADLTYYAHSVKGRFTISRDNSKNTLYLQMNSLRAEDTAEYYCAIYTGRWAPFEYWGQGTLVTVSS

SEQ ID NO: 667 - protein, 119 aa, synthetic construct; identical to SEQ ID NO: 54
  REGION 1..119: note = DOM1h-574-208 anti-TNFR1 dAb

SEQ ID NO: 668 - protein, 119 aa, synthetic construct
  REGION 1..119: note = DOM1h-574-209 anti-TNFR1 dAb
EVQLLESGGGLVQPGGSLRLSCAASGFTFFKYSMGWVRQAPGKGLEWVSQISDTADRTYYAHSVKGRFTISRDNSKNTLYLQMNSLRVEDTAVYYCAIYTGQWAPYEYWGQGTLVTVSS

SEQ ID NO: 669 - protein, 119 aa, synthetic construct
  REGION 1..119: note = DOM1h-574-211 anti-TNFR1 dAb
EVQLLESGGGLVQPGGSLRLSCAASGFTFAKYSMGWVRQAPGKGLEWVSQISDTADRTYYAHAVKGRFTISRDNSKNTLYLQMNSLRAEDTAVYYCAIYTGRWVPFEYWGQGTLVTVSS

SEQ ID NO: 670 - protein, 119 aa, synthetic construct; identical to SEQ ID NO: 654
  REGION 1..119: note = DOM1h-574-212 anti-TNFR1 dAb

SEQ ID NO: 671 - protein, 119 aa, synthetic construct
  REGION 1..119: note = DOM1h-574-213 anti-TNFR1 dAb
EVQLLESGGGLVQPGGSLRLSCAASGFTFDKYSMGWVRQAPGKGLEWVSQISDTADRTYYAHSVKGRFTITRDNSKNTLYLQMNSLRAEDTAVYYCAIYTGRWEPFEYWGQGTLVTVSS

SEQ ID NO: 672 - protein, 119 aa, synthetic construct
  REGION 1..119: note = DOM1h-574-214 anti-TNFR1 dAb
EVQLLESGGGLVQPGGSLRLSCAASGFTFSKYSMGWVRQAPGKGLEWVSQISDTADRTYYADSVKGRFTISRDNSKNTLYLQMNSLRAEDTAVYYCAIYTGRWVPFEYWGQGTLVTVSS

SEQ ID NO: 673 - protein, 251 aa, synthetic construct
  REGION 1..251: note = ATROSAB scFv (scFv IZI06.1)
QVQLVQSGAEVKKPGSSVKVSCKASGYTFTDFYINWVRQAPGQGLEWIGEIYPYSGHAYYNEKFKARVTITADKSTSTAYMELSSLRSEDTAVYYCARWDFLDYWGQGTTVTVSSGGGGSGGGGSGGSAQDIVMTQSPLSLPVTPGEPASISCRSSQSLLHSNGNTYLHWYLQKPGQSPQLLIYTVSNRFSGVPDRFSGSGSGTDFTLKISRVEAEDVGVYYCSQSTHVPYTFGGGTKVEIKRGGSGGAAA

SEQ ID NO: 674 - protein, 243 aa, synthetic construct
  REGION 1..243: note = scFV IG11
QVQLVQSGAEVKKPGSSVKVSCKASGYTFTDFYINWVRQAPGQGLEWIGEIVPTQGEAKYNDKFKARVTITADKSTSTAYMELSSLRSEDTAVYYCARWDFLDYWGQGTTVTVSSGGGGSGGGGSGGSAQDIVMTQSPLSLPVTPGEPASISCRSSQSLLHSNGNTYLHWYLQKPGQSPQLLIYTVSNRFSGVPDRFSGSGSGTDFTLKISRVEAEDVGVYYCSQSTHVPYTFGGGTKVEIKR

SEQ ID NO: 675 - protein, 243 aa, synthetic construct
  REGION 1..243: note = scFV T12B
HVQLVQSGAEVKKPGSSVKVSCKASGYTFTDFYINWVRQAPGQGLEWIGEIVPSQGEAKYNDKFKARVTITADKSTSTAYMELSSLRSEDTAVYYCARWDFLDYWGQGTTVTVSSGGGGSGGGGSGGSAQDIVMTQSPLSLPVTPGEPASISCRSSQSLLHSNGNTYLHWYLQKPGQSPQLLIYTVSNRFSGVPDRFSGSGSGTDFTLKISRVEAEDVGVYYCSQGTHVPYTFGGGTKVEIKR

SEQ ID NO: 676 - protein, 242 aa, synthetic construct
  REGION 1..242: note = scFV 13.7
HVQLVQSGAEVKKPGSSVKVSCKASGYTFTDFYINWVRQAPGQGLEWIGEIVPSQGEAKYNDKFKARVTITADKSTSTAYMELSSLRSEDTAVYYCARWDFLDYWGQGTTVTVSSGGGGSGGGGSGGGGSDVQMTQSPSSLSASVGDRVTITCRSSQSLLHSNGNTYLHWYQQKPGKAPKLLIYTVSNRFSGVPSRFSGSGSGTDFTLTISSLQPEDFATYYCSQSTHVPYTFGGGTKVEIK

SEQ ID NO: 677 - protein, 231 aa, synthetic construct
  REGION 1..231: note = H398 scFV w/ AST linker
QVQLQESGAELARPGASVKLSCKASGYTFTDFYINWVKQRTGQGLEWIGEIYPYSGHAYYNEKFKAKATLTADKSSSTAFMQLNSLTSEDSAVYFCVRWDFLDYWGQGTTLTVSSASTDIVMTQSPLSLPVSLGDQASISCRSSQSLLHSNGNTYLHWYVQKPGQSPKLLIYTVSNRFSGVPDRFSGSGSGTDFTLKISRVEAEDLGVYFCSQSTHVPYTFGGGTKLEIKR

SEQ ID NO: 678 - protein, 243 aa, synthetic construct
  REGION 1..243: note = H398 scFv w/ (GGGGS)3 linker
QVQLQESGAELARPGASVKLSCKASGYTFTDFYINWVKQRTGQGLEWIGEIYPYSGHAYYNEKFKAKATLTADKSSSTAFMQLNSLTSEDSAVYFCVRWDFLDYWGQGTTLTVSSGGGGSGGGGSGGGGSDIVMTQSPLSLPVSLGDQASISCRSSQSLLHSNGNTYLHWYVQKPGQSPKLLIYTVSNRFSGVPDRFSGSGSGTDFTLKISRVEAEDLGVYFCSQSTHVPYTFGGGTKLEIKR

SEQ ID NO: 679 - protein, 219 aa, synthetic construct; identical to SEQ ID NO: 32
  REGION 1..219: note = FabATR (ATROSAB Fab) light chain

SEQ ID NO: 680 - protein, 218 aa, synthetic construct
  REGION 1..218: note = FabATR (ATROSAB Fab) heavy chain
QVQLVQSGAEVKKPGSSVKVSCKASGYTFTDFYINWVRQAPGQGLEWIGEIYPYSGHAYYNEKFKARVTITADKSTSTAYMELSSLRSEDTAVYYCARWDFLDYWGQGTTVTVSSASTKGPSVFPLAPSSKSTSGGTAALGCLVKDYFPEPVTVSWNSGALTSGVHTFPAVLQSSGLYSLSSVVTVPSSSLGTQTYICNVNHKPSNTKVDKKVEPKSC

SEQ ID NO: 681 - protein, 219 aa, synthetic construct
  REGION 1..219: note = Fab 13.7 light chain
DVQMTQSPSSLSASVGDRVTITCRSSQSLLHSNGNTYLHWYQQKPGKAPKLLIYTVSNRFSGVPSRFSGSGSGTDFTLTISSLQPEDFATYYCSQSTHVPYTFGGGTKVEIKRTVAAPSVFIFPPSDEQLKSGTASVVCLLNNFYPREAKVQWKVDNALQSGNSQESVTEQDSKDSTYSLSSTLTLSKADYEKHKVYACEVTHQGLSSPVTKSFNRGEC

SEQ ID NO: 682 - protein, 218 aa, synthetic construct
  REGION 1..218: note = Fab 13.7 heavy chain
HVQLVQSGAEVKKPGSSVKVSCKASGYTFTDFYINWVRQAPGQGLEWIGEIVPSQGEAKYNDKFKARVTITADKSTSTAYMELSSLRSEDTAVYYCARWDFLDYWGQGTTVTVSSASTKGPSVFPLAPSSKSTSGGTAALGCLVKDYFPEPVTVSWNSGALTSGVHTFPAVLQSSGLYSLSSVVTVPSSSLGTQTYICNVNHKPSNTKVDKKVEPKSC

SEQ ID NO: 683 - protein, 119 aa, synthetic construct
  REGION 1..119: note = Nb 70 nanobody
QVQLQESGGGLVQAGGPLRLSCAASVRTFSSYAMGWFRQAPGKEREFVAAISWSGGSTYYADSVKGRFTISRDNAKNTVYLQMNSLKPEDTAVYYCAVLHEDLYEYDYWGQGTQVTVSS

SEQ ID NO: 684 - protein, 124 aa, synthetic construct
  REGION 1..124: note = Nb 96 nanobody
QVQLQESGGGVVQPGGSLTLSCTRTGFTASTNAYGWYRQGPGKKCEWVSYMTIPSGRTTYADAVKGRFAMSRDKAKSTVFLQMNSLKPEDTAVYYCGDVPFSTLPAMCTNDGPWGQGTQVTVSS

SEQ ID NO: 685 - protein, 157 aa, synthetic construct
  REGION 1..157: note = TNFR1-selective antagonist TNF mutein R32W/S86T
VRSSSRTPSDKPVAHVVANPQAEGQLQWLNRWANALLANGVELRDNQLVVPSEGLYLIYSQVLFKGQGCPSTHVLLTHTISRIAVTYQTKVNLLSAIKSPCQRETPEGAEAKPWYEPIYLGGVFQLEKGDRLSAEINRPDYLDFAESGQVYFGIIAL

SEQ ID NO: 686 - protein, 157 aa, synthetic construct
  REGION 1..157: note = TNFR1-selective antagonist TNF mutein L29S
VRSSSRTPSDKPVAHVVANPQAEGQLQWSNRRANALLANGVELRDNQLVVPSEGLYLIYSQVLFKGQGCPSTHVLLTHTISRIAVSYQTKVNLLSAIKSPCQRETPEGAEAKPWYEPIYLGGVFQLEKGDRLSAEINRPDYLDFAESGQVYFGIIAL

SEQ ID NO: 687 - protein, 157 aa, synthetic construct
  REGION 1..157: note = TNFR1-selective antagonist TNF mutein L29G
VRSSSRTPSDKPVAHVVANPQAEGQLQWGNRRANALLANGVELRDNQLVVPSEGLYLIYSQVLFKGQGCPSTHVLLTHTISRIAVSYQTKVNLLSAIKSPCQRETPEGAEAKPWYEPIYLGGVFQLEKGDRLSAEINRPDYLDFAESGQVYFGIIAL

SEQ ID NO: 688 - protein, 157 aa, synthetic construct
  REGION 1..157: note = TNFR1-selective antagonistTNF mutein L29Y
VRSSSRTPSDKPVAHVVANPQAEGQLQWYNRRANALLANGVELRDNQLVVPSEGLYLIYSQVLFKGQGCPSTHVLLTHTISRIAVSYQTKVNLLSAIKSPCQRETPEGAEAKPWYEPIYLGGVFQLEKGDRLSAEINRPDYLDFAESGQVYFGIIAL

SEQ ID NO: 689 - protein, 157 aa, synthetic construct
  REGION 1..157: note = TNFR1-selective antagonist TNF mutein R31E
VRSSSRTPSDKPVAHVVANPQAEGQLQWLNERANALLANGVELRDNQLVVPSEGLYLIYSQVLFKGQGCPSTHVLLTHTISRIAVSYQTKVNLLSAIKSPCQRETPEGAEAKPWYEPIYLGGVFQLEKGDRLSAEINRPDYLDFAESGQVYFGIIAL

SEQ ID NO: 690 - protein, 157 aa, synthetic construct
  REGION 1..157: note = TNFR1-selective antagonist TNF mutein R31N
VRSSSRTPSDKPVAHVVANPQAEGQLQWLNNRANALLANGVELRDNQLVVPSEGLYLIYSQVLFKGQGCPSTHVLLTHTISRIAVSYQTKVNLLSAIKSPCQRETPEGAEAKPWYEPIYLGGVFQLEKGDRLSAEINRPDYLDFAESGQVYFGIIAL

SEQ ID NO: 691 - protein, 157 aa, synthetic construct
  REGION 1..157: note = TNFR1-selective antagonist TNF mutein R32W
VRSSSRTPSDKPVAHVVANPQAEGQLQWLNRWANALLANGVELRDNQLVVPSEGLYLIYSQVLFKGQGCPSTHVLLTHTISRIAVSYQTKVNLLSAIKSPCQRETPEGAEAKPWYEPIYLGGVFQLEKGDRLSAEINRPDYLDFAESGQVYFGIIAL

SEQ ID NO: 692 - protein, 157 aa, synthetic construct
  REGION 1..157: note = TNFR1-selective antagonist TNF mutein R32Y
VRSSSRTPSDKPVAHVVANPQAEGQLQWLNRYANALLANGVELRDNQLVVPSEGLYLIYSQVLFKGQGCPSTHVLLTHTISRIAVSYQTKVNLLSAIKSPCQRETPEGAEAKPWYEPIYLGGVFQLEKGDRLSAEINRPDYLDFAESGQVYFGIIAL

SEQ ID NO: 693 - protein, 157 aa, synthetic construct
  REGION 1..157: note = TNFR1-selective antagonist TNF mutein S86T
VRSSSRTPSDKPVAHVVANPQAEGQLQWLNRRANALLANGVELRDNQLVVPSEGLYLIYSQVLFKGQGCPSTHVLLTHTISRIAVTYQTKVNLLSAIKSPCQRETPEGAEAKPWYEPIYLGGVFQLEKGDRLSAEINRPDYLDFAESGQVYFGIIAL

SEQ ID NO: 694 - protein, 157 aa, synthetic construct
  REGION 1..157: note = TNFR1-selective antagonist TNF mutein R31N/R32T
VRSSSRTPSDKPVAHVVANPQAEGQLQWLNNTANALLANGVELRDNQLVVPSEGLYLIYSQVLFKGQGCPSTHVLLTHTISRIAVSYQTKVNLLSAIKSPCQRETPEGAEAKPWYEPIYLGGVFQLEKGDRLSAEINRPDYLDFAESGQVYFGIIAL

SEQ ID NO: 695 - protein, 157 aa, synthetic construct
  REGION 1..157: note = TNFR1-selective antagonist TNF mutein L29S/R32W
VRSSSRTPSDKPVAHVVANPQAEGQLQWSNRWANALLANGVELRDNQLVVPSEGLYLIYSQVLFKGQGCPSTHVLLTHTISRIAVSYQTKVNLLSAIKSPCQRETPEGAEAKPWYEPIYLGGVFQLEKGDRLSAEINRPDYLDFAESGQVYFGIIAL

SEQ ID NO: 696 - protein, 157 aa, synthetic construct
  REGION 1..157: note = TNFR1-selective antagonist TNF mutein L29S/S86T
VRSSSRTPSDKPVAHVVANPQAEGQLQWSNRRANALLANGVELRDNQLVVPSEGLYLIYSQVLFKGQGCPSTHVLLTHTISRIAVTYQTKVNLLSAIKSPCQRETPEGAEAKPWYEPIYLGGVFQLEKGDRLSAEINRPDYLDFAESGQVYFGIIAL

SEQ ID NO: 697 - protein, 157 aa, synthetic construct
  REGION 1..157: note = TNFR1-selective antagonist TNF mutein L29S/R32W/S86T
VRSSSRTPSDKPVAHVVANPQAEGQLQWSNRWANALLANGVELRDNQLVVPSEGLYLIYSQVLFKGQGCPSTHVLLTHTISRIAVTYQTKVNLLSAIKSPCQRETPEGAEAKPWYEPIYLGGVFQLEKGDRLSAEINRPDYLDFAESGQVYFGIIAL

SEQ ID NO: 698 - protein, 157 aa, synthetic construct
  REGION 1..157: note = TNFR1-selective antagonist TNF mutein R31E/S86T
VRSSSRTPSDKPVAHVVANPQAEGQLQWLNERANALLANGVELRDNQLVVPSEGLYLIYSQVLFKGQGCPSTHVLLTHTISRIAVTYQTKVNLLSAIKSPCQRETPEGAEAKPWYEPIYLGGVFQLEKGDRLSAEINRPDYLDFAESGQVYFGIIAL

SEQ ID NO: 699 - protein, 157 aa, synthetic construct
  REGION 1..157: note = TNFR1-selective antagonist TNF mutein R31N/R32T/S86T
VRSSSRTPSDKPVAHVVANPQAEGQLQWLNNTANALLANGVELRDNQLVVPSEGLYLIYSQVLFKGQGCPSTHVLLTHTISRIAVTYQTKVNLLSAIKSPCQRETPEGAEAKPWYEPIYLGGVFQLEKGDRLSAEINRPDYLDFAESGQVYFGIIAL

SEQ ID NO: 700 - protein, 157 aa, synthetic construct
  REGION 1..157: note = TNFR1-selective antagonist TNF mutein E146R
VRSSSRTPSDKPVAHVVANPQAEGQLQWLNRRANALLANGVELRDNQLVVPSEGLYLIYSQVLFKGQGCPSTHVLLTHTISRIAVSYQTKVNLLSAIKSPCQRETPEGAEAKPWYEPIYLGGVFQLEKGDRLSAEINRPDYLDFARSGQVYFGIIAL

SEQ ID NO: 701 - protein, 157 aa, synthetic construct
  REGION 1..157: note = XPro1595
MRSSSRTPSDKPVAHVVANPQAEGQLQWLNCRANALLANGVELRDNQLVVPSEGLYLIYSQVLFKGQGVPSTHVLLTHTISRIAVSHQTKVNLLSAIKSPAQRETPEGAEAKPWYEPIYLGGVFQLEKGDRLSAEINRPDYLDFRESGQVYFGIIAL

SEQ ID NO: 702 - protein, 157 aa, synthetic construct
  REGION 1..157: note = XENP345
VRSSSRTPSDKPVAHVVANPQAEGQLQWLNRRANALLANGVELRDNQLVVPSEGLYLIYSQVLFKGQGCPSTHVLLTHTISRIAVSYQTKVNLLSATKSPCQRETPEGAEAKPWYEPIYLGGVFQLEKGDRLSAEINRPDYLDFRESGQVYFGIIAL

SEQ ID NO: 703 - protein, 157 aa, synthetic construct
  REGION 1..157: note = R1antTNF
VRSSSRTPSDKPVAHVVANPQAEGQLQWLNRRANALLANGVELRDNQLVVPSEGLYLIYSQVLFKGQGCPSTHVLLTHTISRISTTHNQKVNLLSAIKSPCQRETPEGAEAKPWYEPIYLGGVFQLEKGDRLSAEINRPDYLDFAESGQVYFGIIAL

SEQ ID NO: 704 - protein, 242 aa, synthetic construct
  REGION 1..242: note = DOM1h-574-208 - albudAb fusion protein
EVQLLESGGGLVQPGGSLRLSCAASGFTFDKYSMGWVRQAPGKGLEWVSQISDTADRTYYAHAVKGRFTISRDNSKNTLYLQMNSLRAEDTAVYYCAIYTGRWVPFEYWGQGTLVTVSSGGGGSGGGGSGGGGSDIQMTQSPSSLSASVGDRVTITCRASRPIGTTLSWYQQKPGKAPKLLILWNSRLQSGVPSRFSGSGSGTDFTLTISSLQPEDFATYYCAQAGTHPTTFGQGTKVEIKR

SEQ ID NO: 705 - protein, 242 aa, synthetic construct
  REGION 1..242: note = DOM1h-131-206 dAb - albudAb fusion protein
EVQLLESGGGLVQPGGSLRLSCAASGFTFAHETMVWVRQAPGKGLEWVSHIPPDGQDPFYADSVKGRFTISRDNSKNTLYLQMNSLRAEDTAVYHCALLPKRGPWFDYWGQGTLVTVSSGGGGSGGGGSGGGGSDIQMTQSPSSLSASVGDRVTITCRASRPIGTTLSWYQQKPGKAPKLLILWNSRLQSGVPSRFSGSGSGTDFTLTISSLQPEDFATYYCAQAGTHPTTFGQGTKVEIKR

SEQ ID NO: 706 - protein, 466 aa, synthetic construct
  REGION 1..466: note = H398 scFv-SCDKTH-trastuzumab Fc fusion protein
QVQLQESGAELARPGASVKLSCKASGYTFTDFYINWVKQRTGQGLEWIGEIYPYSGHAYYNEKFKAKATLTADKSSSTAFMQLNSLTSEDSAVYFCVRWDFLDYWGQGTTLTVSSGGGGSGGGGSGGGGSDIVMTQSPLSLPVSLGDQASISCRSSQSLLHSNGNTYLHWYVQKPGQSPKLLIYTVSNRFSGVPDRFSGSGSGTDFTLKISRVEAEDLGVYFCSQSTHVPYTFGGGTKLEIKRSCDKTHAPELLGGPSVFLFPPKPKDTLMISRTPEVTCVVVDVSHEDPEVKFNWYVDGVEVHNAKTKPREEQYNSTYRVVSVLTVLHQDWLNGKEYKCKVSNKALPAPIEKTISKAKGQPREPQVYTLPPSREEMTKNQVSLTCLVKGFYPSDIAVEWESNGQPENNYKTTPPVLDSDGSFFLYSKLTVDKSRWQQGNVFSCSVMHEALHNHYTQKSLSLSPGK

SEQ ID NO: 707 - protein, 475 aa, synthetic construct
  REGION 1..475: note = H398 scFv-GGGGSGGGGSGGGGS-Trastuzumab Fc fusion protein
QVQLQESGAELARPGASVKLSCKASGYTFTDFYINWVKQRTGQGLEWIGEIYPYSGHAYYNEKFKAKATLTADKSSSTAFMQLNSLTSEDSAVYFCVRWDFLDYWGQGTTLTVSSGGGGSGGGGSGGGGSDIVMTQSPLSLPVSLGDQASISCRSSQSLLHSNGNTYLHWYVQKPGQSPKLLIYTVSNRFSGVPDRFSGSGSGTDFTLKISRVEAEDLGVYFCSQSTHVPYTFGGGTKLEIKRGGGGSGGGGSGGGGSAPELLGGPSVFLFPPKPKDTLMISRTPEVTCVVVDVSHEDPEVKFNWYVDGVEVHNAKTKPREEQYNSTYRVVSVLTVLHQDWLNGKEYKCKVSNKALPAPIEKTISKAKGQPREPQVYTLPPSREEMTKNQVSLTCLVKGFYPSDIAVEWESNGQPENNYKTTPPVLDSDGSFFLYSKLTVDKSRWQQGNVFSCSVMHEALHNHYTQKSLSLSPGK

SEQ ID NO: 708 - protein, 481 aa, synthetic construct
  REGION 1..481: note = H398 scFv-GGGGSGGGGSGGGGS-SCDKTH-Trastuzumab Fc fusion protein
QVQLQESGAELARPGASVKLSCKASGYTFTDFYINWVKQRTGQGLEWIGEIYPYSGHAYYNEKFKAKATLTADKSSSTAFMQLNSLTSEDSAVYFCVRWDFLDYWGQGTTLTVSSGGGGSGGGGSGGGGSDIVMTQSPLSLPVSLGDQASISCRSSQSLLHSNGNTYLHWYVQKPGQSPKLLIYTVSNRFSGVPDRFSGSGSGTDFTLKISRVEAEDLGVYFCSQSTHVPYTFGGGTKLEIKRGGGGSGGGGSGGGGSSCDKTHAPELLGGPSVFLFPPKPKDTLMISRTPEVTCVVVDVSHEDPEVKFNWYVDGVEVHNAKTKPREEQYNSTYRVVSVLTVLHQDWLNGKEYKCKVSNKALPAPIEKTISKAKGQPREPQVYTLPPSREEMTKNQVSLTCLVKGFYPSDIAVEWESNGQPENNYKTTPPVLDSDGSFFLYSKLTVDKSRWQQGNVFSCSVMHEALHNHYTQKSLSLSPGK

SEQ ID NO: 709 - protein, 849 aa, synthetic construct
  REGION 1..849: note = H398 scFv-GGGGSGGGGSGGGGS-HSA fusion protein
QVQLQESGAELARPGASVKLSCKASGYTFTDFYINWVKQRTGQGLEWIGEIYPYSGHAYYNEKFKAKATLTADKSSSTAFMQLNSLTSEDSAVYFCVRWDFLDYWGQGTTLTVSSGGGGSGGGGSGGGGSDIVMTQSPLSLPVSLGDQASISCRSSQSLLHSNGNTYLHWYVQKPGQSPKLLIYTVSNRFSGVPDRFSGSGSGTDFTLKISRVEAEDLGVYFCSQSTHVPYTFGGGTKLEIKRGGGGSGGGGSGGGGSRGVFRRDAHKSEVAHRFKDLGEENFKALVLIAFAQYLQQCPFEDHVKLVNEVTEFAKTCVADESAENCDKSLHTLFGDKLCTVATLRETYGEMADCCAKQEPERNECFLQHKDDNPNLPRLVRPEVDVMCTAFHDNEETFLKKYLYEIARRHPYFYAPELLFFAKRYKAAFTECCQAADKAACLLPKLDELRDEGKASSAKQRLKCASLQKFGERAFKAWAVARLSQRFPKAEFAEVSKLVTDLTKVHTECCHGDLLECADDRADLAKYICENQDSISSKLKECCEKPLLEKSHCIAEVENDEMPADLPSLAADFVESKDVCKNYAEAKDVFLGMFLYEYARRHPDYSVVLLLRLAKTYETTLEKCCAAADPHECYAKVFDEFKPLVEEPQNLIKQNCELFEQLGEYKFQNALLVRYTKKVPQVSTPTLVEVSRNLGKVGSKCCKHPEAKRMPCAEDYLSVVLNQLCVLHEKTPVSDRVTKCCTESLVNRRPCFSALEVDETYVPKEFNAETFTFHADICTLSEKERQIKKQTALVELVKHKPKATKEQLKAVMDDFAAFVEKCCKADDKETCFAEEGKKLVAASQAALGL

SEQ ID NO: 710 - protein, 342 aa, synthetic construct
  REGION 1..342: note = DOMlh-574-16-SCDKTH-Trastuzumab Fc fusion protein
EVQLLESGGGLVQPGGSLRLSCAASGFTFVKYSMGWVRQAPGKGPEWVSQISNTGDRTYYADSVKGRFTISRDNSKNTLYLQMNSLRAEDTAVYYCAIYTGRWEPFDYWGQGTLVTVSSSCDKTHAPELLGGPSVFLFPPKPKDTLMISRTPEVTCVVVDVSHEDPEVKFNWYVDGVEVHNAKTKPREEQYNSTYRVVSVLTVLHQDWLNGKEYKCKVSNKALPAPIEKTISKAKGQPREPQVYTLPPSREEMTKNQVSLTCLVKGFYPSDIAVEWESNGQPENNYKTTPPVLDSDGSFFLYSKLTVDKSRWQQGNVFSCSVMHEALHNHYTQKSLSLSPGK

SEQ ID NO: 711 - protein, 351 aa, synthetic construct
  REGION 1..351: note = DOMlh-574-16-GGGGSGGGGSGGGGS-Trastuzumab Fc fusion protein
EVQLLESGGGLVQPGGSLRLSCAASGFTFVKYSMGWVRQAPGKGPEWVSQISNTGDRTYYADSVKGRFTISRDNSKNTLYLQMNSLRAEDTAVYYCAIYTGRWEPFDYWGQGTLVTVSSGGGGSGGGGSGGGGSAPELLGGPSVFLFPPKPKDTLMISRTPEVTCVVVDVSHEDPEVKFNWYVDGVEVHNAKTKPREEQYNSTYRVVSVLTVLHQDWLNGKEYKCKVSNKALPAPIEKTISKAKGQPREPQVYTLPPSREEMTKNQVSLTCLVKGFYPSDIAVEWESNGQPENNYKTTPPVLDSDGSFFLYSKLTVDKSRWQQGNVFSCSVMHEALHNHYTQKSLSLSPGK

SEQ ID NO: 712 - protein, 357 aa, synthetic construct
  REGION 1..357: note = DOMlh-574-16-GGGGSGGGGSGGGGS-SCDKTH-Trastuzumab Fc fusion protein
EVQLLESGGGLVQPGGSLRLSCAASGFTFVKYSMGWVRQAPGKGPEWVSQISNTGDRTYYADSVKGRFTISRDNSKNTLYLQMNSLRAEDTAVYYCAIYTGRWEPFDYWGQGTLVTVSSGGGGSGGGGSGGGGSSCDKTHAPELLGGPSVFLFPPKPKDTLMISRTPEVTCVVVDVSHEDPEVKFNWYVDGVEVHNAKTKPREEQYNSTYRVVSVLTVLHQDWLNGKEYKCKVSNKALPAPIEKTISKAKGQPREPQVYTLPPSREEMTKNQVSLTCLVKGFYPSDIAVEWESNGQPENNYKTTPPVLDSDGSFFLYSKLTVDKSRWQQGNVFSCSVMHEALHNHYTQKSLSLSPGK

SEQ ID NO: 713 - protein, 725 aa, synthetic construct
  REGION 1..725: note = DOMlh-574-16-GGGGSGGGGSGGGGS-HSA fusion protein
EVQLLESGGGLVQPGGSLRLSCAASGFTFVKYSMGWVRQAPGKGPEWVSQISNTGDRTYYADSVKGRFTISRDNSKNTLYLQMNSLRAEDTAVYYCAIYTGRWEPFDYWGQGTLVTVSSGGGGSGGGGSGGGGSRGVFRRDAHKSEVAHRFKDLGEENFKALVLIAFAQYLQQCPFEDHVKLVNEVTEFAKTCVADESAENCDKSLHTLFGDKLCTVATLRETYGEMADCCAKQEPERNECFLQHKDDNPNLPRLVRPEVDVMCTAFHDNEETFLKKYLYEIARRHPYFYAPELLFFAKRYKAAFTECCQAADKAACLLPKLDELRDEGKASSAKQRLKCASLQKFGERAFKAWAVARLSQRFPKAEFAEVSKLVTDLTKVHTECCHGDLLECADDRADLAKYICENQDSISSKLKECCEKPLLEKSHCIAEVENDEMPADLPSLAADFVESKDVCKNYAEAKDVFLGMFLYEYARRHPDYSVVLLLRLAKTYETTLEKCCAAADPHECYAKVFDEFKPLVEEPQNLIKQNCELFEQLGEYKFQNALLVRYTKKVPQVSTPTLVEVSRNLGKVGSKCCKHPEAKRMPCAEDYLSVVLNQLCVLHEKTPVSDRVTKCCTESLVNRRPCFSALEVDETYVPKEFNAETFTFHADICTLSEKERQIKKQTALVELVKHKPKATKEQLKAVMDDFAAFVEKCCKADDKETCFAEEGKKLVAASQAALGL

SEQ ID NO: 714 - protein, 342 aa, synthetic construct
  REGION 1..342: note = DOMlh-549-SCDKTH-Trastuzumab Fc fusion protein
EVQLLESGGGLVQPGGSLRLSCAASGFTFVDYEMHWVRQAPGKGLEWVSSISESGTTTYYADSVKGRFTISRDNSKNTLYLQMNSLRAEDTAVYYCAKRRFSASTFDYWGQGTLVTVSSSCDKTHAPELLGGPSVFLFPPKPKDTLMISRTPEVTCVVVDVSHEDPEVKFNWYVDGVEVHNAKTKPREEQYNSTYRVVSVLTVLHQDWLNGKEYKCKVSNKALPAPIEKTISKAKGQPREPQVYTLPPSREEMTKNQVSLTCLVKGFYPSDIAVEWESNGQPENNYKTTPPVLDSDGSFFLYSKLTVDKSRWQQGNVFSCSVMHEALHNHYTQKSLSLSPGK

SEQ ID NO: 715 - protein, 351 aa, synthetic construct
  REGION 1..351: note = DOMlh-549-GGGGSGGGGSGGGGS-Trastuzumab Fc fusion protein
EVQLLESGGGLVQPGGSLRLSCAASGFTFVDYEMHWVRQAPGKGLEWVSSISESGTTTYYADSVKGRFTISRDNSKNTLYLQMNSLRAEDTAVYYCAKRRFSASTFDYWGQGTLVTVSSGGGGSGGGGSGGGGSAPELLGGPSVFLFPPKPKDTLMISRTPEVTCVVVDVSHEDPEVKFNWYVDGVEVHNAKTKPREEQYNSTYRVVSVLTVLHQDWLNGKEYKCKVSNKALPAPIEKTISKAKGQPREPQVYTLPPSREEMTKNQVSLTCLVKGFYPSDIAVEWESNGQPENNYKTTPPVLDSDGSFFLYSKLTVDKSRWQQGNVFSCSVMHEALHNHYTQKSLSLSPGK

SEQ ID NO: 716 - protein, 357 aa, synthetic construct
  REGION 1..357: note = DOMlh-549-GGGGSGGGGSGGGGS-SCDKTH-Trastuzumab Fc fusion protein
EVQLLESGGGLVQPGGSLRLSCAASGFTFVDYEMHWVRQAPGKGLEWVSSISESGTTTYYADSVKGRFTISRDNSKNTLYLQMNSLRAEDTAVYYCAKRRFSASTFDYWGQGTLVTVSSGGGGSGGGGSGGGGSSCDKTHAPELLGGPSVFLFPPKPKDTLMISRTPEVTCVVVDVSHEDPEVKFNWYVDGVEVHNAKTKPREEQYNSTYRVVSVLTVLHQDWLNGKEYKCKVSNKALPAPIEKTISKAKGQPREPQVYTLPPSREEMTKNQVSLTCLVKGFYPSDIAVEWESNGQPENNYKTTPPVLDSDGSFFLYSKLTVDKSRWQQGNVFSCSVMHEALHNHYTQKSLSLSPGK

SEQ ID NO: 717 - protein, 725 aa, synthetic construct
  REGION 1..725: note = DOMlh-549-GGGGSGGGGSGGGGS-HSA fusion protein
EVQLLESGGGLVQPGGSLRLSCAASGFTFVDYEMHWVRQAPGKGLEWVSSISESGTTTYYADSVKGRFTISRDNSKNTLYLQMNSLRAEDTAVYYCAKRRFSASTFDYWGQGTLVTVSSGGGGSGGGGSGGGGSRGVFRRDAHKSEVAHRFKDLGEENFKALVLIAFAQYLQQCPFEDHVKLVNEVTEFAKTCVADESAENCDKSLHTLFGDKLCTVATLRETYGEMADCCAKQEPERNECFLQHKDDNPNLPRLVRPEVDVMCTAFHDNEETFLKKYLYEIARRHPYFYAPELLFFAKRYKAAFTECCQAADKAACLLPKLDELRDEGKASSAKQRLKCASLQKFGERAFKAWAVARLSQRFPKAEFAEVSKLVTDLTKVHTECCHGDLLECADDRADLAKYICENQDSISSKLKECCEKPLLEKSHCIAEVENDEMPADLPSLAADFVESKDVCKNYAEAKDVFLGMFLYEYARRHPDYSVVLLLRLAKTYETTLEKCCAAADPHECYAKVFDEFKPLVEEPQNLIKQNCELFEQLGEYKFQNALLVRYTKKVPQVSTPTLVEVSRNLGKVGSKCCKHPEAKRMPCAEDYLSVVLNQLCVLHEKTPVSDRVTKCCTESLVNRRPCFSALEVDETYVPKEFNAETFTFHADICTLSEKERQIKKQTALVELVKHKPKATKEQLKAVMDDFAAFVEKCCKADDKETCFAEEGKKLVAASQAALGL

SEQ ID NO: 718 - protein, 342 aa, synthetic construct
  REGION 1..342: note = DOM1h-574-208-SCDKTH-Trastuzumab Fc fusion protein
EVQLLESGGGLVQPGGSLRLSCAASGFTFDKYSMGWVRQAPGKGLEWVSQISDTADRTYYAHAVKGRFTISRDNSKNTLYLQMNSLRAEDTAVYYCAIYTGRWVPFEYWGQGTLVTVSSSCDKTHAPELLGGPSVFLFPPKPKDTLMISRTPEVTCVVVDVSHEDPEVKFNWYVDGVEVHNAKTKPREEQYNSTYRVVSVLTVLHQDWLNGKEYKCKVSNKALPAPIEKTISKAKGQPREPQVYTLPPSREEMTKNQVSLTCLVKGFYPSDIAVEWESNGQPENNYKTTPPVLDSDGSFFLYSKLTVDKSRWQQGNVFSCSVMHEALHNHYTQKSLSLSPGK

SEQ ID NO: 719 - protein, 351 aa, synthetic construct
  REGION 1..351: note = DOM1h-574-208-GGGGSGGGGSGGGGS-Trastuzumab Fc fusion protein
EVQLLESGGGLVQPGGSLRLSCAASGFTFDKYSMGWVRQAPGKGLEWVSQISDTADRTYYAHAVKGRFTISRDNSKNTLYLQMNSLRAEDTAVYYCAIYTGRWVPFEYWGQGTLVTVSSGGGGSGGGGSGGGGSAPELLGGPSVFLFPPKPKDTLMISRTPEVTCVVVDVSHEDPEVKFNWYVDGVEVHNAKTKPREEQYNSTYRVVSVLTVLHQDWLNGKEYKCKVSNKALPAPIEKTISKAKGQPREPQVYTLPPSREEMTKNQVSLTCLVKGFYPSDIAVEWESNGQPENNYKTTPPVLDSDGSFFLYSKLTVDKSRWQQGNVFSCSVMHEALHNHYTQKSLSLSPGK

SEQ ID NO: 720 - protein, 357 aa, synthetic construct
  REGION 1..357: note = DOM1h-574-208-GGGGSGGGGSGGGGS-SCDKTH-Trastuzumab Fc fusion protein
EVQLLESGGGLVQPGGSLRLSCAASGFTFDKYSMGWVRQAPGKGLEWVSQISDTADRTYYAHAVKGRFTISRDNSKNTLYLQMNSLRAEDTAVYYCAIYTGRWVPFEYWGQGTLVTVSSGGGGSGGGGSGGGGSSCDKTHAPELLGGPSVFLFPPKPKDTLMISRTPEVTCVVVDVSHEDPEVKFNWYVDGVEVHNAKTKPREEQYNSTYRVVSVLTVLHQDWLNGKEYKCKVSNKALPAPIEKTISKAKGQPREPQVYTLPPSREEMTKNQVSLTCLVKGFYPSDIAVEWESNGQPENNYKTTPPVLDSDGSFFLYSKLTVDKSRWQQGNVFSCSVMHEALHNHYTQKSLSLSPGK

SEQ ID NO: 721 - protein, 725 aa, synthetic construct
  REGION 1..725: note = DOM1h-574-208-GGGGSGGGGSGGGGS-HSA fusion protein
EVQLLESGGGLVQPGGSLRLSCAASGFTFDKYSMGWVRQAPGKGLEWVSQISDTADRTYYAHAVKGRFTISRDNSKNTLYLQMNSLRAEDTAVYYCAIYTGRWVPFEYWGQGTLVTVSSGGGGSGGGGSGGGGSRGVFRRDAHKSEVAHRFKDLGEENFKALVLIAFAQYLQQCPFEDHVKLVNEVTEFAKTCVADESAENCDKSLHTLFGDKLCTVATLRETYGEMADCCAKQEPERNECFLQHKDDNPNLPRLVRPEVDVMCTAFHDNEETFLKKYLYEIARRHPYFYAPELLFFAKRYKAAFTECCQAADKAACLLPKLDELRDEGKASSAKQRLKCASLQKFGERAFKAWAVARLSQRFPKAEFAEVSKLVTDLTKVHTECCHGDLLECADDRADLAKYICENQDSISSKLKECCEKPLLEKSHCIAEVENDEMPADLPSLAADFVESKDVCKNYAEAKDVFLGMFLYEYARRHPDYSVVLLLRLAKTYETTLEKCCAAADPHECYAKVFDEFKPLVEEPQNLIKQNCELFEQLGEYKFQNALLVRYTKKVPQVSTPTLVEVSRNLGKVGSKCCKHPEAKRMPCAEDYLSVVLNQLCVLHEKTPVSDRVTKCCTESLVNRRPCFSALEVDETYVPKEFNAETFTFHADICTLSEKERQIKKQTALVELVKHKPKATKEQLKAVMDDFAAFVEKCCKADDKETCFAEEGKKLVAASQAALGL

SEQ ID NO: 722 - protein, 342 aa, synthetic construct
  REGION 1..342: note = DOM1h-131-206-SCDKTH-Trastuzumab Fc fusion protein
EVQLLESGGGLVQPGGSLRLSCAASGFTFAHETMVWVRQAPGKGLEWVSHIPPDGQDPFYADSVKGRFTISRDNSKNTLYLQMNSLRAEDTAVYHCALLPKRGPWFDYWGQGTLVTVSSSCDKTHAPELLGGPSVFLFPPKPKDTLMISRTPEVTCVVVDVSHEDPEVKFNWYVDGVEVHNAKTKPREEQYNSTYRVVSVLTVLHQDWLNGKEYKCKVSNKALPAPIEKTISKAKGQPREPQVYTLPPSREEMTKNQVSLTCLVKGFYPSDIAVEWESNGQPENNYKTTPPVLDSDGSFFLYSKLTVDKSRWQQGNVFSCSVMHEALHNHYTQKSLSLSPGK

SEQ ID NO: 723 - protein, 351 aa, synthetic construct
  REGION 1..351: note = DOM1h-131-206-GGGGSGGGGSGGGGS-Trastuzumab Fc fusion protein
EVQLLESGGGLVQPGGSLRLSCAASGFTFAHETMVWVRQAPGKGLEWVSHIPPDGQDPFYADSVKGRFTISRDNSKNTLYLQMNSLRAEDTAVYHCALLPKRGPWFDYWGQGTLVTVSSGGGGSGGGGSGGGGSAPELLGGPSVFLFPPKPKDTLMISRTPEVTCVVVDVSHEDPEVKFNWYVDGVEVHNAKTKPREEQYNSTYRVVSVLTVLHQDWLNGKEYKCKVSNKALPAPIEKTISKAKGQPREPQVYTLPPSREEMTKNQVSLTCLVKGFYPSDIAVEWESNGQPENNYKTTPPVLDSDGSFFLYSKLTVDKSRWQQGNVFSCSVMHEALHNHYTQKSLSLSPGK

SEQ ID NO: 724 - protein, 357 aa, synthetic construct
  REGION 1..357: note = DOM1h-131-206-GGGGSGGGGSGGGGS-SCDKTH-Trastuzumab Fc fusion protein
EVQLLESGGGLVQPGGSLRLSCAASGFTFAHETMVWVRQAPGKGLEWVSHIPPDGQDPFYADSVKGRFTISRDNSKNTLYLQMNSLRAEDTAVYHCALLPKRGPWFDYWGQGTLVTVSSGGGGSGGGGSGGGGSSCDKTHAPELLGGPSVFLFPPKPKDTLMISRTPEVTCVVVDVSHEDPEVKFNWYVDGVEVHNAKTKPREEQYNSTYRVVSVLTVLHQDWLNGKEYKCKVSNKALPAPIEKTISKAKGQPREPQVYTLPPSREEMTKNQVSLTCLVKGFYPSDIAVEWESNGQPENNYKTTPPVLDSDGSFFLYSKLTVDKSRWQQGNVFSCSVMHEALHNHYTQKSLSLSPGK

SEQ ID NO: 725 - protein, 725 aa, synthetic construct
  REGION 1..725: note = DOM1h-131-206-GGGGSGGGGSGGGGS-HSA fusion protein
EVQLLESGGGLVQPGGSLRLSCAASGFTFAHETMVWVRQAPGKGLEWVSHIPPDGQDPFYADSVKGRFTISRDNSKNTLYLQMNSLRAEDTAVYHCALLPKRGPWFDYWGQGTLVTVSSGGGGSGGGGSGGGGSRGVFRRDAHKSEVAHRFKDLGEENFKALVLIAFAQYLQQCPFEDHVKLVNEVTEFAKTCVADESAENCDKSLHTLFGDKLCTVATLRETYGEMADCCAKQEPERNECFLQHKDDNPNLPRLVRPEVDVMCTAFHDNEETFLKKYLYEIARRHPYFYAPELLFFAKRYKAAFTECCQAADKAACLLPKLDELRDEGKASSAKQRLKCASLQKFGERAFKAWAVARLSQRFPKAEFAEVSKLVTDLTKVHTECCHGDLLECADDRADLAKYICENQDSISSKLKECCEKPLLEKSHCIAEVENDEMPADLPSLAADFVESKDVCKNYAEAKDVFLGMFLYEYARRHPDYSVVLLLRLAKTYETTLEKCCAAADPHECYAKVFDEFKPLVEEPQNLIKQNCELFEQLGEYKFQNALLVRYTKKVPQVSTPTLVEVSRNLGKVGSKCCKHPEAKRMPCAEDYLSVVLNQLCVLHEKTPVSDRVTKCCTESLVNRRPCFSALEVDETYVPKEFNAETFTFHADICTLSEKERQIKKQTALVELVKHKPKATKEQLKAVMDDFAAFVEKCCKADDKETCFAEEGKKLVAASQAALGL

SEQ ID NO: 726 - protein, 472 aa, synthetic construct
  REGION 1..472: note = H398 scFv-ESKYGPPCPPCP-Nivolumab Fc fusion protein
QVQLQESGAELARPGASVKLSCKASGYTFTDFYINWVKQRTGQGLEWIGEIYPYSGHAYYNEKFKAKATLTADKSSSTAFMQLNSLTSEDSAVYFCVRWDFLDYWGQGTTLTVSSGGGGSGGGGSGGGGSDIVMTQSPLSLPVSLGDQASISCRSSQSLLHSNGNTYLHWYVQKPGQSPKLLIYTVSNRFSGVPDRFSGSGSGTDFTLKISRVEAEDLGVYFCSQSTHVPYTFGGGTKLEIKRESKYGPPCPPCPAPEFLGGPSVFLFPPKPKDTLMISRTPEVTCVVVDVSQEDPEVQFNWYVDGVEVHNAKTKPREEQFNSTYRVVSVLTVLHQDWLNGKEYKCKVSNKGLPSSIEKTISKAKGQPREPQVYTLPPSQEEMTKNQVSLTCLVKGFYPSDIAVEWESNGQPENNYKTTPPVLDSDGSFFLYSRLTVDKSRWQEGNVFSCSVMHEALHNHYTQKSLSLSLGK

SEQ ID NO: 727 - protein, 475 aa, synthetic construct
  REGION 1..475: note = H398 scFv-GGGGSGGGGSGGGGS-Nivolumab Fc fusion protein
QVQLQESGAELARPGASVKLSCKASGYTFTDFYINWVKQRTGQGLEWIGEIYPYSGHAYYNEKFKAKATLTADKSSSTAFMQLNSLTSEDSAVYFCVRWDFLDYWGQGTTLTVSSGGGGSGGGGSGGGGSDIVMTQSPLSLPVSLGDQASISCRSSQSLLHSNGNTYLHWYVQKPGQSPKLLIYTVSNRFSGVPDRFSGSGSGTDFTLKISRVEAEDLGVYFCSQSTHVPYTFGGGTKLEIKRGGGGSGGGGSGGGGSAPEFLGGPSVFLFPPKPKDTLMISRTPEVTCVVVDVSQEDPEVQFNWYVDGVEVHNAKTKPREEQFNSTYRVVSVLTVLHQDWLNGKEYKCKVSNKGLPSSIEKTISKAKGQPREPQVYTLPPSQEEMTKNQVSLTCLVKGFYPSDIAVEWESNGQPENNYKTTPPVLDSDGSFFLYSRLTVDKSRWQEGNVFSCSVMHEALHNHYTQKSLSLSLGK

SEQ ID NO: 728 - protein, 487 aa, synthetic construct
  REGION 1..487: note = H398 scFv-GGGGSGGGGSGGGGS-ESKYGPPCPPCP-Nivolumab Fc fusion protein
QVQLQESGAELARPGASVKLSCKASGYTFTDFYINWVKQRTGQGLEWIGEIYPYSGHAYYNEKFKAKATLTADKSSSTAFMQLNSLTSEDSAVYFCVRWDFLDYWGQGTTLTVSSGGGGSGGGGSGGGGSDIVMTQSPLSLPVSLGDQASISCRSSQSLLHSNGNTYLHWYVQKPGQSPKLLIYTVSNRFSGVPDRFSGSGSGTDFTLKISRVEAEDLGVYFCSQSTHVPYTFGGGTKLEIKRGGGGSGGGGSGGGGSESKYGPPCPPCPAPEFLGGPSVFLFPPKPKDTLMISRTPEVTCVVVDVSQEDPEVQFNWYVDGVEVHNAKTKPREEQFNSTYRVVSVLTVLHQDWLNGKEYKCKVSNKGLPSSIEKTISKAKGQPREPQVYTLPPSQEEMTKNQVSLTCLVKGFYPSDIAVEWESNGQPENNYKTTPPVLDSDGSFFLYSRLTVDKSRWQEGNVFSCSVMHEALHNHYTQKSLSLSLGK

SEQ ID NO: 729 - protein, 348 aa, synthetic construct
  REGION 1..348: note = DOMlh-574-16-ESKYGPPCPPCP-Nivolumab Fc fusion protein
EVQLLESGGGLVQPGGSLRLSCAASGFTFVKYSMGWVRQAPGKGPEWVSQISNTGDRTYYADSVKGRFTISRDNSKNTLYLQMNSLRAEDTAVYYCAIYTGRWEPFDYWGQGTLVTVSSESKYGPPCPPCPAPEFLGGPSVFLFPPKPKDTLMISRTPEVTCVVVDVSQEDPEVQFNWYVDGVEVHNAKTKPREEQFNSTYRVVSVLTVLHQDWLNGKEYKCKVSNKGLPSSIEKTISKAKGQPREPQVYTLPPSQEEMTKNQVSLTCLVKGFYPSDIAVEWESNGQPENNYKTTPPVLDSDGSFFLYSRLTVDKSRWQEGNVFSCSVMHEALHNHYTQKSLSLSLGK

SEQ ID NO: 730 - protein, 351 aa, synthetic construct
  REGION 1..351: note = DOMlh-574-16-GGGGSGGGGSGGGGS-Nivolumab Fc fusion protein
EVQLLESGGGLVQPGGSLRLSCAASGFTFVKYSMGWVRQAPGKGPEWVSQISNTGDRTYYADSVKGRFTISRDNSKNTLYLQMNSLRAEDTAVYYCAIYTGRWEPFDYWGQGTLVTVSSGGGGSGGGGSGGGGSAPEFLGGPSVFLFPPKPKDTLMISRTPEVTCVVVDVSQEDPEVQFNWYVDGVEVHNAKTKPREEQFNSTYRVVSVLTVLHQDWLNGKEYKCKVSNKGLPSSIEKTISKAKGQPREPQVYTLPPSQEEMTKNQVSLTCLVKGFYPSDIAVEWESNGQPENNYKTTPPVLDSDGSFFLYSRLTVDKSRWQEGNVFSCSVMHEALHNHYTQKSLSLSLGK

SEQ ID NO: 731 - protein, 363 aa, synthetic construct
  REGION 1..363: note = DOMlh-574-16-GGGGSGGGGSGGGGS-ESKYGPPCPPCP-Nivoluma b Fc fusion protein
EVQLLESGGGLVQPGGSLRLSCAASGFTFVKYSMGWVRQAPGKGPEWVSQISNTGDRTYYADSVKGRFTISRDNSKNTLYLQMNSLRAEDTAVYYCAIYTGRWEPFDYWGQGTLVTVSSGGGGSGGGGSGGGGSESKYGPPCPPCPAPEFLGGPSVFLFPPKPKDTLMISRTPEVTCVVVDVSQEDPEVQFNWYVDGVEVHNAKTKPREEQFNSTYRVVSVLTVLHQDWLNGKEYKCKVSNKGLPSSIEKTISKAKGQPREPQVYTLPPSQEEMTKNQVSLTCLVKGFYPSDIAVEWESNGQPENNYKTTPPVLDSDGSFFLYSRLTVDKSRWQEGNVFSCSVMHEALHNHYTQKSLSLSLGK

SEQ ID NO: 732 - protein, 348 aa, synthetic construct
  REGION 1..348: note = DOMlh-549-ESKYGPPCPPCP-Nivolumab Fc fusion protein
EVQLLESGGGLVQPGGSLRLSCAASGFTFVDYEMHWVRQAPGKGLEWVSSISESGTTTYYADSVKGRFTISRDNSKNTLYLQMNSLRAEDTAVYYCAKRRFSASTFDYWGQGTLVTVSSESKYGPPCPPCPAPEFLGGPSVFLFPPKPKDTLMISRTPEVTCVVVDVSQEDPEVQFNWYVDGVEVHNAKTKPREEQFNSTYRVVSVLTVLHQDWLNGKEYKCKVSNKGLPSSIEKTISKAKGQPREPQVYTLPPSQEEMTKNQVSLTCLVKGFYPSDIAVEWESNGQPENNYKTTPPVLDSDGSFFLYSRLTVDKSRWQEGNVFSCSVMHEALHNHYTQKSLSLSLGK

SEQ ID NO: 733 - protein, 351 aa, synthetic construct
  REGION 1..351: note = DOMlh-549-GGGGSGGGGSGGGGS-Nivolumab Fc fusion protein
EVQLLESGGGLVQPGGSLRLSCAASGFTFVDYEMHWVRQAPGKGLEWVSSISESGTTTYYADSVKGRFTISRDNSKNTLYLQMNSLRAEDTAVYYCAKRRFSASTFDYWGQGTLVTVSSGGGGSGGGGSGGGGSAPEFLGGPSVFLFPPKPKDTLMISRTPEVTCVVVDVSQEDPEVQFNWYVDGVEVHNAKTKPREEQFNSTYRVVSVLTVLHQDWLNGKEYKCKVSNKGLPSSIEKTISKAKGQPREPQVYTLPPSQEEMTKNQVSLTCLVKGFYPSDIAVEWESNGQPENNYKTTPPVLDSDGSFFLYSRLTVDKSRWQEGNVFSCSVMHEALHNHYTQKSLSLSLGK

SEQ ID NO: 734 - protein, 363 aa, synthetic construct
  REGION 1..363: note = DOMlh-549-GGGGSGGGGSGGGGS-ESKYGPPCPPCP-Nivolumab Fc fusion protein
EVQLLESGGGLVQPGGSLRLSCAASGFTFVDYEMHWVRQAPGKGLEWVSSISESGTTTYYADSVKGRFTISRDNSKNTLYLQMNSLRAEDTAVYYCAKRRFSASTFDYWGQGTLVTVSSGGGGSGGGGSGGGGSESKYGPPCPPCPAPEFLGGPSVFLFPPKPKDTLMISRTPEVTCVVVDVSQEDPEVQFNWYVDGVEVHNAKTKPREEQFNSTYRVVSVLTVLHQDWLNGKEYKCKVSNKGLPSSIEKTISKAKGQPREPQVYTLPPSQEEMTKNQVSLTCLVKGFYPSDIAVEWESNGQPENNYKTTPPVLDSDGSFFLYSRLTVDKSRWQEGNVFSCSVMHEALHNHYTQKSLSLSLGK

SEQ ID NO: 735 - protein, 348 aa, synthetic construct
  REGION 1..348: note = DOM1h-574-208-ESKYGPPCPPCP-Nivolumab Fc fusion protein
EVQLLESGGGLVQPGGSLRLSCAASGFTFDKYSMGWVRQAPGKGLEWVSQISDTADRTYYAHAVKGRFTISRDNSKNTLYLQMNSLRAEDTAVYYCAIYTGRWVPFEYWGQGTLVTVSSESKYGPPCPPCPAPEFLGGPSVFLFPPKPKDTLMISRTPEVTCVVVDVSQEDPEVQFNWYVDGVEVHNAKTKPREEQFNSTYRVVSVLTVLHQDWLNGKEYKCKVSNKGLPSSIEKTISKAKGQPREPQVYTLPPSQEEMTKNQVSLTCLVKGFYPSDIAVEWESNGQPENNYKTTPPVLDSDGSFFLYSRLTVDKSRWQEGNVFSCSVMHEALHNHYTQKSLSLSLGK

SEQ ID NO: 736 - protein, 351 aa, synthetic construct
  REGION 1..351: note = DOM1h-574-208-GGGGSGGGGSGGGGS-Nivolumab Fc fusion protein
EVQLLESGGGLVQPGGSLRLSCAASGFTFDKYSMGWVRQAPGKGLEWVSQISDTADRTYYAHAVKGRFTISRDNSKNTLYLQMNSLRAEDTAVYYCAIYTGRWVPFEYWGQGTLVTVSSGGGGSGGGGSGGGGSAPEFLGGPSVFLFPPKPKDTLMISRTPEVTCVVVDVSQEDPEVQFNWYVDGVEVHNAKTKPREEQFNSTYRVVSVLTVLHQDWLNGKEYKCKVSNKGLPSSIEKTISKAKGQPREPQVYTLPPSQEEMTKNQVSLTCLVKGFYPSDIAVEWESNGQPENNYKTTPPVLDSDGSFFLYSRLTVDKSRWQEGNVFSCSVMHEALHNHYTQKSLSLSLGK

SEQ ID NO: 737 - protein, 363 aa, synthetic construct
  REGION 1..363: note = DOM1h-574-208-GGGGSGGGGSGGGGS-ESKYGPPCPPCP-Nivolum ab Fc fusion protein
EVQLLESGGGLVQPGGSLRLSCAASGFTFDKYSMGWVRQAPGKGLEWVSQISDTADRTYYAHAVKGRFTISRDNSKNTLYLQMNSLRAEDTAVYYCAIYTGRWVPFEYWGQGTLVTVSSGGGGSGGGGSGGGGSESKYGPPCPPCPAPEFLGGPSVFLFPPKPKDTLMISRTPEVTCVVVDVSQEDPEVQFNWYVDGVEVHNAKTKPREEQFNSTYRVVSVLTVLHQDWLNGKEYKCKVSNKGLPSSIEKTISKAKGQPREPQVYTLPPSQEEMTKNQVSLTCLVKGFYPSDIAVEWESNGQPENNYKTTPPVLDSDGSFFLYSRLTVDKSRWQEGNVFSCSVMHEALHNHYTQKSLSLSLGK

SEQ ID NO: 738 - protein, 348 aa, synthetic construct
  REGION 1..348: note = DOM1h-131-206-ESKYGPPCPPCP-Nivolumab Fc fusion protein
EVQLLESGGGLVQPGGSLRLSCAASGFTFAHETMVWVRQAPGKGLEWVSHIPPDGQDPFYADSVKGRFTISRDNSKNTLYLQMNSLRAEDTAVYHCALLPKRGPWFDYWGQGTLVTVSSESKYGPPCPPCPAPEFLGGPSVFLFPPKPKDTLMISRTPEVTCVVVDVSQEDPEVQFNWYVDGVEVHNAKTKPREEQFNSTYRVVSVLTVLHQDWLNGKEYKCKVSNKGLPSSIEKTISKAKGQPREPQVYTLPPSQEEMTKNQVSLTCLVKGFYPSDIAVEWESNGQPENNYKTTPPVLDSDGSFFLYSRLTVDKSRWQEGNVFSCSVMHEALHNHYTQKSLSLSLGK

SEQ ID NO: 739 - protein, 351 aa, synthetic construct
  REGION 1..351: note = DOM1h-131-206-GGGGSGGGGSGGGGS-Nivolumab Fc fusion protein
EVQLLESGGGLVQPGGSLRLSCAASGFTFAHETMVWVRQAPGKGLEWVSHIPPDGQDPFYADSVKGRFTISRDNSKNTLYLQMNSLRAEDTAVYHCALLPKRGPWFDYWGQGTLVTVSSGGGGSGGGGSGGGGSAPEFLGGPSVFLFPPKPKDTLMISRTPEVTCVVVDVSQEDPEVQFNWYVDGVEVHNAKTKPREEQFNSTYRVVSVLTVLHQDWLNGKEYKCKVSNKGLPSSIEKTISKAKGQPREPQVYTLPPSQEEMTKNQVSLTCLVKGFYPSDIAVEWESNGQPENNYKTTPPVLDSDGSFFLYSRLTVDKSRWQEGNVFSCSVMHEALHNHYTQKSLSLSLGK

SEQ ID NO: 740 - protein, 363 aa, synthetic construct
  REGION 1..363: note = DOM1h-131-206-GGGGSGGGGSGGGGS-ESKYGPPCPPCP-Nivolum ab Fc fusion protein
EVQLLESGGGLVQPGGSLRLSCAASGFTFAHETMVWVRQAPGKGLEWVSHIPPDGQDPFYADSVKGRFTISRDNSKNTLYLQMNSLRAEDTAVYHCALLPKRGPWFDYWGQGTLVTVSSGGGGSGGGGSGGGGSESKYGPPCPPCPAPEFLGGPSVFLFPPKPKDTLMISRTPEVTCVVVDVSQEDPEVQFNWYVDGVEVHNAKTKPREEQFNSTYRVVSVLTVLHQDWLNGKEYKCKVSNKGLPSSIEKTISKAKGQPREPQVYTLPPSQEEMTKNQVSLTCLVKGFYPSDIAVEWESNGQPENNYKTTPPVLDSDGSFFLYSRLTVDKSRWQEGNVFSCSVMHEALHNHYTQKSLSLSLGK

SEQ ID NO: 741 - protein, 380 aa, synthetic construct
  REGION 1..380: note = TNF(R32W/S86T)-SCDKTH-Trastuzumab Fc fusion protein
VRSSSRTPSDKPVAHVVANPQAEGQLQWLNRWANALLANGVELRDNQLVVPSEGLYLIYSQVLFKGQGCPSTHVLLTHTISRIAVTYQTKVNLLSAIKSPCQRETPEGAEAKPWYEPIYLGGVFQLEKGDRLSAEINRPDYLDFAESGQVYFGIIALSCDKTHAPELLGGPSVFLFPPKPKDTLMISRTPEVTCVVVDVSHEDPEVKFNWYVDGVEVHNAKTKPREEQYNSTYRVVSVLTVLHQDWLNGKEYKCKVSNKALPAPIEKTISKAKGQPREPQVYTLPPSREEMTKNQVSLTCLVKGFYPSDIAVEWESNGQPENNYKTTPPVLDSDGSFFLYSKLTVDKSRWQQGNVFSCSVMHEALHNHYTQKSLSLSPGK

SEQ ID NO: 742 - protein, 389 aa, synthetic construct
  REGION 1..389: note = TNF(R32W/S86T)-GGGGSGGGGSGGGGS-Trastuzumab Fc fusion protein
VRSSSRTPSDKPVAHVVANPQAEGQLQWLNRWANALLANGVELRDNQLVVPSEGLYLIYSQVLFKGQGCPSTHVLLTHTISRIAVTYQTKVNLLSAIKSPCQRETPEGAEAKPWYEPIYLGGVFQLEKGDRLSAEINRPDYLDFAESGQVYFGIIALGGGGSGGGGSGGGGSAPELLGGPSVFLFPPKPKDTLMISRTPEVTCVVVDVSHEDPEVKFNWYVDGVEVHNAKTKPREEQYNSTYRVVSVLTVLHQDWLNGKEYKCKVSNKALPAPIEKTISKAKGQPREPQVYTLPPSREEMTKNQVSLTCLVKGFYPSDIAVEWESNGQPENNYKTTPPVLDSDGSFFLYSKLTVDKSRWQQGNVFSCSVMHEALHNHYTQKSLSLSPGK

SEQ ID NO: 743 - protein, 395 aa, synthetic construct
  REGION 1..395: note = TNF(R32W/S86T)-GGGGSGGGGSGGGGS-SCDKTH-Trastuzumab Fc fusion protein
VRSSSRTPSDKPVAHVVANPQAEGQLQWLNRWANALLANGVELRDNQLVVPSEGLYLIYSQVLFKGQGCPSTHVLLTHTISRIAVTYQTKVNLLSAIKSPCQRETPEGAEAKPWYEPIYLGGVFQLEKGDRLSAEINRPDYLDFAESGQVYFGIIALGGGGSGGGGSGGGGSSCDKTHAPELLGGPSVFLFPPKPKDTLMISRTPEVTCVVVDVSHEDPEVKFNWYVDGVEVHNAKTKPREEQYNSTYRVVSVLTVLHQDWLNGKEYKCKVSNKALPAPIEKTISKAKGQPREPQVYTLPPSREEMTKNQVSLTCLVKGFYPSDIAVEWESNGQPENNYKTTPPVLDSDGSFFLYSKLTVDKSRWQQGNVFSCSVMHEALHNHYTQKSLSLSPGK

SEQ ID NO: 744 - protein, 380 aa, synthetic construct
  REGION 1..380: note = TNF(V1M/R31C/C69V/Y87H/C101A/A145R)-SCDKTH-Trastuz umab Fc fusion protein
MRSSSRTPSDKPVAHVVANPQAEGQLQWLNCRANALLANGVELRDNQLVVPSEGLYLIYSQVLFKGQGVPSTHVLLTHTISRIAVSHQTKVNLLSAIKSPAQRETPEGAEAKPWYEPIYLGGVFQLEKGDRLSAEINRPDYLDFRESGQVYFGIIALSCDKTHAPELLGGPSVFLFPPKPKDTLMISRTPEVTCVVVDVSHEDPEVKFNWYVDGVEVHNAKTKPREEQYNSTYRVVSVLTVLHQDWLNGKEYKCKVSNKALPAPIEKTISKAKGQPREPQVYTLPPSREEMTKNQVSLTCLVKGFYPSDIAVEWESNGQPENNYKTTPPVLDSDGSFFLYSKLTVDKSRWQQGNVFSCSVMHEALHNHYTQKSLSLSPGK

SEQ ID NO: 745 - protein, 389 aa, synthetic construct
  REGION 1..389: note = TNF(V1M/R31C/C69V/Y87H/C101A/A145R)-GGGGSGGGGSGGGG S-Trastuzumab Fc fusion protein
MRSSSRTPSDKPVAHVVANPQAEGQLQWLNCRANALLANGVELRDNQLVVPSEGLYLIYSQVLFKGQGVPSTHVLLTHTISRIAVSHQTKVNLLSAIKSPAQRETPEGAEAKPWYEPIYLGGVFQLEKGDRLSAEINRPDYLDFRESGQVYFGIIALGGGGSGGGGSGGGGSAPELLGGPSVFLFPPKPKDTLMISRTPEVTCVVVDVSHEDPEVKFNWYVDGVEVHNAKTKPREEQYNSTYRVVSVLTVLHQDWLNGKEYKCKVSNKALPAPIEKTISKAKGQPREPQVYTLPPSREEMTKNQVSLTCLVKGFYPSDIAVEWESNGQPENNYKTTPPVLDSDGSFFLYSKLTVDKSRWQQGNVFSCSVMHEALHNHYTQKSLSLSPGK

SEQ ID NO: 746 - protein, 395 aa, synthetic construct
  REGION 1..395: note = TNF(V1M/R31C/C69V/Y87H/C101A/A145R)-GGGGSGGGGSGGGG S-SCDKTH-Trastuzumab Fc fusion protein
MRSSSRTPSDKPVAHVVANPQAEGQLQWLNCRANALLANGVELRDNQLVVPSEGLYLIYSQVLFKGQGVPSTHVLLTHTISRIAVSHQTKVNLLSAIKSPAQRETPEGAEAKPWYEPIYLGGVFQLEKGDRLSAEINRPDYLDFRESGQVYFGIIALGGGGSGGGGSGGGGSSCDKTHAPELLGGPSVFLFPPKPKDTLMISRTPEVTCVVVDVSHEDPEVKFNWYVDGVEVHNAKTKPREEQYNSTYRVVSVLTVLHQDWLNGKEYKCKVSNKALPAPIEKTISKAKGQPREPQVYTLPPSREEMTKNQVSLTCLVKGFYPSDIAVEWESNGQPENNYKTTPPVLDSDGSFFLYSKLTVDKSRWQQGNVFSCSVMHEALHNHYTQKSLSLSPGK

SEQ ID NO: 747 - protein, 380 aa, synthetic construct
  REGION 1..380: note = TNF(A84S/V85T/S86T/Y87H/Q88N/T89Q)-SCDKTH-Trastuzu mab Fc fusion protein
VRSSSRTPSDKPVAHVVANPQAEGQLQWLNRRANALLANGVELRDNQLVVPSEGLYLIYSQVLFKGQGCPSTHVLLTHTISRISTTHNQKVNLLSAIKSPCQRETPEGAEAKPWYEPIYLGGVFQLEKGDRLSAEINRPDYLDFAESGQVYFGIIALSCDKTHAPELLGGPSVFLFPPKPKDTLMISRTPEVTCVVVDVSHEDPEVKFNWYVDGVEVHNAKTKPREEQYNSTYRVVSVLTVLHQDWLNGKEYKCKVSNKALPAPIEKTISKAKGQPREPQVYTLPPSREEMTKNQVSLTCLVKGFYPSDIAVEWESNGQPENNYKTTPPVLDSDGSFFLYSKLTVDKSRWQQGNVFSCSVMHEALHNHYTQKSLSLSPGK

SEQ ID NO: 748 - protein, 389 aa, synthetic construct
  REGION 1..389: note = TNF(A84S/V85T/S86T/Y87H/Q88N/T89Q)-GGGGSGGGGSGGGGS -Trastuzumab Fc fusion protein
VRSSSRTPSDKPVAHVVANPQAEGQLQWLNRRANALLANGVELRDNQLVVPSEGLYLIYSQVLFKGQGCPSTHVLLTHTISRISTTHNQKVNLLSAIKSPCQRETPEGAEAKPWYEPIYLGGVFQLEKGDRLSAEINRPDYLDFAESGQVYFGIIALGGGGSGGGGSGGGGSAPELLGGPSVFLFPPKPKDTLMISRTPEVTCVVVDVSHEDPEVKFNWYVDGVEVHNAKTKPREEQYNSTYRVVSVLTVLHQDWLNGKEYKCKVSNKALPAPIEKTISKAKGQPREPQVYTLPPSREEMTKNQVSLTCLVKGFYPSDIAVEWESNGQPENNYKTTPPVLDSDGSFFLYSKLTVDKSRWQQGNVFSCSVMHEALHNHYTQKSLSLSPGK

SEQ ID NO: 749 - protein, 395 aa, synthetic construct
  REGION 1..395: note = TNF(A84S/V85T/S86T/Y87H/Q88N/T89Q)-GGGGSGGGGSGGGGS -SCDKTH-Trastuzumab Fc fusion protein
VRSSSRTPSDKPVAHVVANPQAEGQLQWLNRRANALLANGVELRDNQLVVPSEGLYLIYSQVLFKGQGCPSTHVLLTHTISRISTTHNQKVNLLSAIKSPCQRETPEGAEAKPWYEPIYLGGVFQLEKGDRLSAEINRPDYLDFAESGQVYFGIIALGGGGSGGGGSGGGGSSCDKTHAPELLGGPSVFLFPPKPKDTLMISRTPEVTCVVVDVSHEDPEVKFNWYVDGVEVHNAKTKPREEQYNSTYRVVSVLTVLHQDWLNGKEYKCKVSNKALPAPIEKTISKAKGQPREPQVYTLPPSREEMTKNQVSLTCLVKGFYPSDIAVEWESNGQPENNYKTTPPVLDSDGSFFLYSKLTVDKSRWQQGNVFSCSVMHEALHNHYTQKSLSLSPGK

SEQ ID NO: 750 - protein, 380 aa, synthetic construct
  REGION 1..380: note = TNF(I97T/A145R)-SCDKTH-Trastuzumab Fc fusion protein
VRSSSRTPSDKPVAHVVANPQAEGQLQWLNRRANALLANGVELRDNQLVVPSEGLYLIYSQVLFKGQGCPSTHVLLTHTISRIAVSYQTKVNLLSATKSPCQRETPEGAEAKPWYEPIYLGGVFQLEKGDRLSAEINRPDYLDFRESGQVYFGIIALSCDKTHAPELLGGPSVFLFPPKPKDTLMISRTPEVTCVVVDVSHEDPEVKFNWYVDGVEVHNAKTKPREEQYNSTYRVVSVLTVLHQDWLNGKEYKCKVSNKALPAPIEKTISKAKGQPREPQVYTLPPSREEMTKNQVSLTCLVKGFYPSDIAVEWESNGQPENNYKTTPPVLDSDGSFFLYSKLTVDKSRWQQGNVFSCSVMHEALHNHYTQKSLSLSPGK

SEQ ID NO: 751 - protein, 389 aa, synthetic construct
  REGION 1..389: note = TNF(I97T/A145R)-GGGGSGGGGSGGGGS-Trastuzumab Fc fusion protein
VRSSSRTPSDKPVAHVVANPQAEGQLQWLNRRANALLANGVELRDNQLVVPSEGLYLIYSQVLFKGQGCPSTHVLLTHTISRIAVSYQTKVNLLSATKSPCQRETPEGAEAKPWYEPIYLGGVFQLEKGDRLSAEINRPDYLDFRESGQVYFGIIALGGGGSGGGGSGGGGSAPELLGGPSVFLFPPKPKDTLMISRTPEVTCVVVDVSHEDPEVKFNWYVDGVEVHNAKTKPREEQYNSTYRVVSVLTVLHQDWLNGKEYKCKVSNKALPAPIEKTISKAKGQPREPQVYTLPPSREEMTKNQVSLTCLVKGFYPSDIAVEWESNGQPENNYKTTPPVLDSDGSFFLYSKLTVDKSRWQQGNVFSCSVMHEALHNHYTQKSLSLSPGK

SEQ ID NO: 752 - protein, 395 aa, synthetic construct
  REGION 1..395: note = TNF(I97T/A145R)-GGGGSGGGGSGGGGS-SCDKTH-Trastuzumab Fc fusion protein
VRSSSRTPSDKPVAHVVANPQAEGQLQWLNRRANALLANGVELRDNQLVVPSEGLYLIYSQVLFKGQGCPSTHVLLTHTISRIAVSYQTKVNLLSATKSPCQRETPEGAEAKPWYEPIYLGGVFQLEKGDRLSAEINRPDYLDFRESGQVYFGIIALGGGGSGGGGSGGGGSSCDKTHAPELLGGPSVFLFPPKPKDTLMISRTPEVTCVVVDVSHEDPEVKFNWYVDGVEVHNAKTKPREEQYNSTYRVVSVLTVLHQDWLNGKEYKCKVSNKALPAPIEKTISKAKGQPREPQVYTLPPSREEMTKNQVSLTCLVKGFYPSDIAVEWESNGQPENNYKTTPPVLDSDGSFFLYSKLTVDKSRWQQGNVFSCSVMHEALHNHYTQKSLSLSPGK

SEQ ID NO: 753 - protein, 386 aa, synthetic construct
  REGION 1..386: note = TNF(R32W/S86T)-ESKYGPPCPPCP-Nivolumab Fc fusion protein
VRSSSRTPSDKPVAHVVANPQAEGQLQWLNRWANALLANGVELRDNQLVVPSEGLYLIYSQVLFKGQGCPSTHVLLTHTISRIAVTYQTKVNLLSAIKSPCQRETPEGAEAKPWYEPIYLGGVFQLEKGDRLSAEINRPDYLDFAESGQVYFGIIALESKYGPPCPPCPAPEFLGGPSVFLFPPKPKDTLMISRTPEVTCVVVDVSQEDPEVQFNWYVDGVEVHNAKTKPREEQFNSTYRVVSVLTVLHQDWLNGKEYKCKVSNKGLPSSIEKTISKAKGQPREPQVYTLPPSQEEMTKNQVSLTCLVKGFYPSDIAVEWESNGQPENNYKTTPPVLDSDGSFFLYSRLTVDKSRWQEGNVFSCSVMHEALHNHYTQKSLSLSLGK

SEQ ID NO: 754 - protein, 389 aa, synthetic construct
  REGION 1..389: note = TNF(R32W/S86T)-GGGGSGGGGSGGGGS-Nivolumab Fc fusion protein
VRSSSRTPSDKPVAHVVANPQAEGQLQWLNRWANALLANGVELRDNQLVVPSEGLYLIYSQVLFKGQGCPSTHVLLTHTISRIAVTYQTKVNLLSAIKSPCQRETPEGAEAKPWYEPIYLGGVFQLEKGDRLSAEINRPDYLDFAESGQVYFGIIALGGGGSGGGGSGGGGSAPEFLGGPSVFLFPPKPKDTLMISRTPEVTCVVVDVSQEDPEVQFNWYVDGVEVHNAKTKPREEQFNSTYRVVSVLTVLHQDWLNGKEYKCKVSNKGLPSSIEKTISKAKGQPREPQVYTLPPSQEEMTKNQVSLTCLVKGFYPSDIAVEWESNGQPENNYKTTPPVLDSDGSFFLYSRLTVDKSRWQEGNVFSCSVMHEALHNHYTQKSLSLSLGK

SEQ ID NO: 755 - protein, 401 aa, synthetic construct
  REGION 1..401: note = TNF(R32W/S86T)-GGGGSGGGGSGGGGS-ESKYGPPCPPCP-Nivolu mab Fc fusion protein
VRSSSRTPSDKPVAHVVANPQAEGQLQWLNRWANALLANGVELRDNQLVVPSEGLYLIYSQVLFKGQGCPSTHVLLTHTISRIAVTYQTKVNLLSAIKSPCQRETPEGAEAKPWYEPIYLGGVFQLEKGDRLSAEINRPDYLDFAESGQVYFGIIALGGGGSGGGGSGGGGSESKYGPPCPPCPAPEFLGGPSVFLFPPKPKDTLMISRTPEVTCVVVDVSQEDPEVQFNWYVDGVEVHNAKTKPREEQFNSTYRVVSVLTVLHQDWLNGKEYKCKVSNKGLPSSIEKTISKAKGQPREPQVYTLPPSQEEMTKNQVSLTCLVKGFYPSDIAVEWESNGQPENNYKTTPPVLDSDGSFFLYSRLTVDKSRWQEGNVFSCSVMHEALHNHYTQKSLSLSLGK

SEQ ID NO: 756 - protein, 386 aa, synthetic construct
  REGION 1..386: note = TNF(V1M/R31C/C69V/Y87H/C101A/A145R)-ESKYGPPCPPCP-N ivolumab Fc fusion protein
MRSSSRTPSDKPVAHVVANPQAEGQLQWLNCRANALLANGVELRDNQLVVPSEGLYLIYSQVLFKGQGVPSTHVLLTHTISRIAVSHQTKVNLLSAIKSPAQRETPEGAEAKPWYEPIYLGGVFQLEKGDRLSAEINRPDYLDFRESGQVYFGIIALESKYGPPCPPCPAPEFLGGPSVFLFPPKPKDTLMISRTPEVTCVVVDVSQEDPEVQFNWYVDGVEVHNAKTKPREEQFNSTYRVVSVLTVLHQDWLNGKEYKCKVSNKGLPSSIEKTISKAKGQPREPQVYTLPPSQEEMTKNQVSLTCLVKGFYPSDIAVEWESNGQPENNYKTTPPVLDSDGSFFLYSRLTVDKSRWQEGNVFSCSVMHEALHNHYTQKSLSLSLGK

SEQ ID NO: 757 - protein, 389 aa, synthetic construct
  REGION 1..389: note = TNF(V1M/R31C/C69V/Y87H/C101A/A145R)-GGGGSGGGGSGGGG S-Nivolumab Fc fusion protein
MRSSSRTPSDKPVAHVVANPQAEGQLQWLNCRANALLANGVELRDNQLVVPSEGLYLIYSQVLFKGQGVPSTHVLLTHTISRIAVSHQTKVNLLSAIKSPAQRETPEGAEAKPWYEPIYLGGVFQLEKGDRLSAEINRPDYLDFRESGQVYFGIIALGGGGSGGGGSGGGGSAPEFLGGPSVFLFPPKPKDTLMISRTPEVTCVVVDVSQEDPEVQFNWYVDGVEVHNAKTKPREEQFNSTYRVVSVLTVLHQDWLNGKEYKCKVSNKGLPSSIEKTISKAKGQPREPQVYTLPPSQEEMTKNQVSLTCLVKGFYPSDIAVEWESNGQPENNYKTTPPVLDSDGSFFLYSRLTVDKSRWQEGNVFSCSVMHEALHNHYTQKSLSLSLGK

SEQ ID NO: 758 - protein, 401 aa, synthetic construct
  REGION 1..401: note = TNF(V1M/R31C/C69V/Y87H/C101A/A145R)-GGGGSGGGGSGGGG S-ESKYGPPCPPCP-Nivolumab Fc fusion protein
MRSSSRTPSDKPVAHVVANPQAEGQLQWLNCRANALLANGVELRDNQLVVPSEGLYLIYSQVLFKGQGVPSTHVLLTHTISRIAVSHQTKVNLLSAIKSPAQRETPEGAEAKPWYEPIYLGGVFQLEKGDRLSAEINRPDYLDFRESGQVYFGIIALGGGGSGGGGSGGGGSESKYGPPCPPCPAPEFLGGPSVFLFPPKPKDTLMISRTPEVTCVVVDVSQEDPEVQFNWYVDGVEVHNAKTKPREEQFNSTYRVVSVLTVLHQDWLNGKEYKCKVSNKGLPSSIEKTISKAKGQPREPQVYTLPPSQEEMTKNQVSLTCLVKGFYPSDIAVEWESNGQPENNYKTTPPVLDSDGSFFLYSRLTVDKSRWQEGNVFSCSVMHEALHNHYTQKSLSLSLGK

SEQ ID NO: 759 - protein, 386 aa, synthetic construct
  REGION 1..386: note = TNF(A84S/V85T/S86T/Y87H/Q88N/T89Q)-ESKYGPPCPPCP-Ni volumab Fc fusion protein
VRSSSRTPSDKPVAHVVANPQAEGQLQWLNRRANALLANGVELRDNQLVVPSEGLYLIYSQVLFKGQGCPSTHVLLTHTISRISTTHNQKVNLLSAIKSPCQRETPEGAEAKPWYEPIYLGGVFQLEKGDRLSAEINRPDYLDFAESGQVYFGIIALESKYGPPCPPCPAPEFLGGPSVFLFPPKPKDTLMISRTPEVTCVVVDVSQEDPEVQFNWYVDGVEVHNAKTKPREEQFNSTYRVVSVLTVLHQDWLNGKEYKCKVSNKGLPSSIEKTISKAKGQPREPQVYTLPPSQEEMTKNQVSLTCLVKGFYPSDIAVEWESNGQPENNYKTTPPVLDSDGSFFLYSRLTVDKSRWQEGNVFSCSVMHEALHNHYTQKSLSLSLGK

SEQ ID NO: 760 - protein, 389 aa, synthetic construct
  REGION 1..389: note = TNF(A84S/V85T/S86T/Y87H/Q88N/T89Q)-GGGGSGGGGSGGGGS -Nivolumab Fc fusion protein
VRSSSRTPSDKPVAHVVANPQAEGQLQWLNRRANALLANGVELRDNQLVVPSEGLYLIYSQVLFKGQGCPSTHVLLTHTISRISTTHNQKVNLLSAIKSPCQRETPEGAEAKPWYEPIYLGGVFQLEKGDRLSAEINRPDYLDFAESGQVYFGIIALGGGGSGGGGSGGGGSAPEFLGGPSVFLFPPKPKDTLMISRTPEVTCVVVDVSQEDPEVQFNWYVDGVEVHNAKTKPREEQFNSTYRVVSVLTVLHQDWLNGKEYKCKVSNKGLPSSIEKTISKAKGQPREPQVYTLPPSQEEMTKNQVSLTCLVKGFYPSDIAVEWESNGQPENNYKTTPPVLDSDGSFFLYSRLTVDKSRWQEGNVFSCSVMHEALHNHYTQKSLSLSLGK

SEQ ID NO: 761 - protein, 401 aa, synthetic construct
  REGION 1..401: note = TNF(A84S/V85T/S86T/Y87H/Q88N/T89Q)-GGGGSGGGGSGGGGS -ESKYGPPCPPCP-Nivolumab Fc fusion protein
VRSSSRTPSDKPVAHVVANPQAEGQLQWLNRRANALLANGVELRDNQLVVPSEGLYLIYSQVLFKGQGCPSTHVLLTHTISRISTTHNQKVNLLSAIKSPCQRETPEGAEAKPWYEPIYLGGVFQLEKGDRLSAEINRPDYLDFAESGQVYFGIIALGGGGSGGGGSGGGGSESKYGPPCPPCPAPEFLGGPSVFLFPPKPKDTLMISRTPEVTCVVVDVSQEDPEVQFNWYVDGVEVHNAKTKPREEQFNSTYRVVSVLTVLHQDWLNGKEYKCKVSNKGLPSSIEKTISKAKGQPREPQVYTLPPSQEEMTKNQVSLTCLVKGFYPSDIAVEWESNGQPENNYKTTPPVLDSDGSFFLYSRLTVDKSRWQEGNVFSCSVMHEALHNHYTQKSLSLSLGK

SEQ ID NO: 762 - protein, 386 aa, synthetic construct
  REGION 1..386: note = TNF(I97T/A145R)-ESKYGPPCPPCP-Nivolumab Fc fusion protein
VRSSSRTPSDKPVAHVVANPQAEGQLQWLNRRANALLANGVELRDNQLVVPSEGLYLIYSQVLFKGQGCPSTHVLLTHTISRIAVSYQTKVNLLSATKSPCQRETPEGAEAKPWYEPIYLGGVFQLEKGDRLSAEINRPDYLDFRESGQVYFGIIALESKYGPPCPPCPAPEFLGGPSVFLFPPKPKDTLMISRTPEVTCVVVDVSQEDPEVQFNWYVDGVEVHNAKTKPREEQFNSTYRVVSVLTVLHQDWLNGKEYKCKVSNKGLPSSIEKTISKAKGQPREPQVYTLPPSQEEMTKNQVSLTCLVKGFYPSDIAVEWESNGQPENNYKTTPPVLDSDGSFFLYSRLTVDKSRWQEGNVFSCSVMHEALHNHYTQKSLSLSLGK

SEQ ID NO: 763 - protein, 389 aa, synthetic construct
  REGION 1..389: note = TNF(I97T/A145R)-GGGGSGGGGSGGGGS-Nivolumab Fc fusion protein
VRSSSRTPSDKPVAHVVANPQAEGQLQWLNRRANALLANGVELRDNQLVVPSEGLYLIYSQVLFKGQGCPSTHVLLTHTISRIAVSYQTKVNLLSATKSPCQRETPEGAEAKPWYEPIYLGGVFQLEKGDRLSAEINRPDYLDFRESGQVYFGIIALGGGGSGGGGSGGGGSAPEFLGGPSVFLFPPKPKDTLMISRTPEVTCVVVDVSQEDPEVQFNWYVDGVEVHNAKTKPREEQFNSTYRVVSVLTVLHQDWLNGKEYKCKVSNKGLPSSIEKTISKAKGQPREPQVYTLPPSQEEMTKNQVSLTCLVKGFYPSDIAVEWESNGQPENNYKTTPPVLDSDGSFFLYSRLTVDKSRWQEGNVFSCSVMHEALHNHYTQKSLSLSLGK

SEQ ID NO: 764 - protein, 401 aa, synthetic construct
  REGION 1..401: note = TNF(I97T/A145R)-GGGGSGGGGSGGGGS-ESKYGPPCPPCP-Nivol umab Fc fusion protein
VRSSSRTPSDKPVAHVVANPQAEGQLQWLNRRANALLANGVELRDNQLVVPSEGLYLIYSQVLFKGQGCPSTHVLLTHTISRIAVSYQTKVNLLSATKSPCQRETPEGAEAKPWYEPIYLGGVFQLEKGDRLSAEINRPDYLDFRESGQVYFGIIALGGGGSGGGGSGGGGSESKYGPPCPPCPAPEFLGGPSVFLFPPKPKDTLMISRTPEVTCVVVDVSQEDPEVQFNWYVDGVEVHNAKTKPREEQFNSTYRVVSVLTVLHQDWLNGKEYKCKVSNKGLPSSIEKTISKAKGQPREPQVYTLPPSQEEMTKNQVSLTCLVKGFYPSDIAVEWESNGQPENNYKTTPPVLDSDGSFFLYSRLTVDKSRWQEGNVFSCSVMHEALHNHYTQKSLSLSLGK

SEQ ID NO: 765 - protein, 157 aa, synthetic construct
  REGION 1..157: note = TNFR2-selective agonist TNF mutein K65W
VRSSSRTPSDKPVAHVVANPQAEGQLQWLNRRANALLANGVELRDNQLVVPSEGLYLIYSQVLFWGQGCPSTHVLLTHTISRIAVSYQTKVNLLSAIKSPCQRETPEGAEAKPWYEPIYLGGVFQLEKGDRLSAEINRPDYLDFAESGQVYFGIIAL

SEQ ID NO: 766 - protein, 157 aa, synthetic construct
  REGION 1..157: note = TNFR2-selective agonist TNF mutein D143Y
VRSSSRTPSDKPVAHVVANPQAEGQLQWLNRRANALLANGVELRDNQLVVPSEGLYLIYSQVLFKGQGCPSTHVLLTHTISRIAVSYQTKVNLLSAIKSPCQRETPEGAEAKPWYEPIYLGGVFQLEKGDRLSAEINRPDYLYFAESGQVYFGIIAL

SEQ ID NO: 767 - protein, 157 aa, synthetic construct
  REGION 1..157: note = TNFR2-selective agonist TNF mutein D143F
VRSSSRTPSDKPVAHVVANPQAEGQLQWLNRRANALLANGVELRDNQLVVPSEGLYLIYSQVLFKGQGCPSTHVLLTHTISRIAVSYQTKVNLLSAIKSPCQRETPEGAEAKPWYEPIYLGGVFQLEKGDRLSAEINRPDYLFFAESGQVYFGIIAL

SEQ ID NO: 768 - protein, 157 aa, synthetic construct
  REGION 1..157: note = TNFR2-selective agonist TNF mutein D143N
VRSSSRTPSDKPVAHVVANPQAEGQLQWLNRRANALLANGVELRDNQLVVPSEGLYLIYSQVLFKGQGCPSTHVLLTHTISRIAVSYQTKVNLLSAIKSPCQRETPEGAEAKPWYEPIYLGGVFQLEKGDRLSAEINRPDYLNFAESGQVYFGIIAL

SEQ ID NO: 769 - protein, 157 aa, synthetic construct
  REGION 1..157: note = TNFR2-selective agonist TNF mutein D143E
VRSSSRTPSDKPVAHVVANPQAEGQLQWLNRRANALLANGVELRDNQLVVPSEGLYLIYSQVLFKGQGCPSTHVLLTHTISRIAVSYQTKVNLLSAIKSPCQRETPEGAEAKPWYEPIYLGGVFQLEKGDRLSAEINRPDYLEFAESGQVYFGIIAL

SEQ ID NO: 770 - protein, 157 aa, synthetic construct
  REGION 1..157: note = TNFR2-selective agonist TNF mutein D143W
VRSSSRTPSDKPVAHVVANPQAEGQLQWLNRRANALLANGVELRDNQLVVPSEGLYLIYSQVLFKGQGCPSTHVLLTHTISRIAVSYQTKVNLLSAIKSPCQRETPEGAEAKPWYEPIYLGGVFQLEKGDRLSAEINRPDYLWFAESGQVYFGIIAL

SEQ ID NO: 771 - protein, 157 aa, synthetic construct
  REGION 1..157: note = TNFR2-selective agonist TNF mutein D143V
VRSSSRTPSDKPVAHVVANPQAEGQLQWLNRRANALLANGVELRDNQLVVPSEGLYLIYSQVLFKGQGCPSTHVLLTHTISRIAVSYQTKVNLLSAIKSPCQRETPEGAEAKPWYEPIYLGGVFQLEKGDRLSAEINRPDYLVFAESGQVYFGIIAL

SEQ ID NO: 772 - protein, 157 aa, synthetic construct
  REGION 1..157: note = TNFR2-selective agonist TNF mutein A145R
VRSSSRTPSDKPVAHVVANPQAEGQLQWLNRRANALLANGVELRDNQLVVPSEGLYLIYSQVLFKGQGCPSTHVLLTHTISRIAVSYQTKVNLLSAIKSPCQRETPEGAEAKPWYEPIYLGGVFQLEKGDRLSAEINRPDYLDFRESGQVYFGIIAL

SEQ ID NO: 773 - protein, 157 aa, synthetic construct
  REGION 1..157: note = TNFR2-selective agonist TNF mutein A145H
VRSSSRTPSDKPVAHVVANPQAEGQLQWLNRRANALLANGVELRDNQLVVPSEGLYLIYSQVLFKGQGCPSTHVLLTHTISRIAVSYQTKVNLLSAIKSPCQRETPEGAEAKPWYEPIYLGGVFQLEKGDRLSAEINRPDYLDFHESGQVYFGIIAL

SEQ ID NO: 774 - protein, 157 aa, synthetic construct
  REGION 1..157: note = TNFR2-selective agonist TNF mutein A145K
VRSSSRTPSDKPVAHVVANPQAEGQLQWLNRRANALLANGVELRDNQLVVPSEGLYLIYSQVLFKGQGCPSTHVLLTHTISRIAVSYQTKVNLLSAIKSPCQRETPEGAEAKPWYEPIYLGGVFQLEKGDRLSAEINRPDYLDFKESGQVYFGIIAL

SEQ ID NO: 775 - protein, 157 aa, synthetic construct
  REGION 1..157: note = TNFR2-selective agonist TNF mutein A145F
VRSSSRTPSDKPVAHVVANPQAEGQLQWLNRRANALLANGVELRDNQLVVPSEGLYLIYSQVLFKGQGCPSTHVLLTHTISRIAVSYQTKVNLLSAIKSPCQRETPEGAEAKPWYEPIYLGGVFQLEKGDRLSAEINRPDYLDFFESGQVYFGIIAL

SEQ ID NO: 776 - protein, 157 aa, synthetic construct
  REGION 1..157: note = TNFR2-selective agonist TNF mutein A145W
VRSSSRTPSDKPVAHVVANPQAEGQLQWLNRRANALLANGVELRDNQLVVPSEGLYLIYSQVLFKGQGCPSTHVLLTHTISRIAVSYQTKVNLLSAIKSPCQRETPEGAEAKPWYEPIYLGGVFQLEKGDRLSAEINRPDYLDFWESGQVYFGIIAL

SEQ ID NO: 777 - protein, 157 aa, synthetic construct
  REGION 1..157: note = TNFR2-selective agonist TNF mutein E146Q
VRSSSRTPSDKPVAHVVANPQAEGQLQWLNRRANALLANGVELRDNQLVVPSEGLYLIYSQVLFKGQGCPSTHVLLTHTISRIAVSYQTKVNLLSAIKSPCQRETPEGAEAKPWYEPIYLGGVFQLEKGDRLSAEINRPDYLDFAQSGQVYFGIIAL

SEQ ID NO: 778 - protein, 157 aa, synthetic construct
  REGION 1..157: note = TNFR2-selective agonist TNF mutein E146H
VRSSSRTPSDKPVAHVVANPQAEGQLQWLNRRANALLANGVELRDNQLVVPSEGLYLIYSQVLFKGQGCPSTHVLLTHTISRIAVSYQTKVNLLSAIKSPCQRETPEGAEAKPWYEPIYLGGVFQLEKGDRLSAEINRPDYLDFAHSGQVYFGIIAL

SEQ ID NO: 779 - protein, 157 aa, synthetic construct
  REGION 1..157: note = TNFR2-selective agonist TNF mutein E146K
VRSSSRTPSDKPVAHVVANPQAEGQLQWLNRRANALLANGVELRDNQLVVPSEGLYLIYSQVLFKGQGCPSTHVLLTHTISRIAVSYQTKVNLLSAIKSPCQRETPEGAEAKPWYEPIYLGGVFQLEKGDRLSAEINRPDYLDFAKSGQVYFGIIAL

SEQ ID NO: 780 - protein, 157 aa, synthetic construct
  REGION 1..157: note = TNFR2-selective agonist TNF mutein E146N
VRSSSRTPSDKPVAHVVANPQAEGQLQWLNRRANALLANGVELRDNQLVVPSEGLYLIYSQVLFKGQGCPSTHVLLTHTISRIAVSYQTKVNLLSAIKSPCQRETPEGAEAKPWYEPIYLGGVFQLEKGDRLSAEINRPDYLDFANSGQVYFGIIAL

SEQ ID NO: 781 - protein, 157 aa, synthetic construct
  REGION 1..157: note = TNFR2-selective agonist TNF mutein D143N/A145R
VRSSSRTPSDKPVAHVVANPQAEGQLQWLNRRANALLANGVELRDNQLVVPSEGLYLIYSQVLFKGQGCPSTHVLLTHTISRIAVSYQTKVNLLSAIKSPCQRETPEGAEAKPWYEPIYLGGVFQLEKGDRLSAEINRPDYLNFRESGQVYFGIIAL

SEQ ID NO: 782 - protein, 157 aa, synthetic construct
  REGION 1..157: note = TNFR2-selective agonist TNF mutein A145R/S147T
VRSSSRTPSDKPVAHVVANPQAEGQLQWLNRRANALLANGVELRDNQLVVPSEGLYLIYSQVLFKGQGCPSTHVLLTHTISRIAVSYQTKVNLLSAIKSPCQRETPEGAEAKPWYEPIYLGGVFQLEKGDRLSAEINRPDYLDFRETGQVYFGIIAL

SEQ ID NO: 783 - protein, 157 aa, synthetic construct
  REGION 1..157: note = TNFR2-selective agonist TNF mutein Q88N/T89S/A145S/E146A/S147D
VRSSSRTPSDKPVAHVVANPQAEGQLQWLNRRANALLANGVELRDNQLVVPSEGLYLIYSQVLFKGQGCPSTHVLLTHTISRIAVSYNSKVNLLSAIKSPCQRETPEGAEAKPWYEPIYLGGVFQLEKGDRLSAEINRPDYLDFSADGQVYFGIIAL

SEQ ID NO: 784 - protein, 157 aa, synthetic construct
  REGION 1..157: note = TNFR2-selective agonist TNF mutein Q88N/A145I/E146G/S147D
VRSSSRTPSDKPVAHVVANPQAEGQLQWLNRRANALLANGVELRDNQLVVPSEGLYLIYSQVLFKGQGCPSTHVLLTHTISRIAVSYNTKVNLLSAIKSPCQRETPEGAEAKPWYEPIYLGGVFQLEKGDRLSAEINRPDYLDFIGDGQVYFGIIAL

SEQ ID NO: 785 - protein, 157 aa, synthetic construct
  REGION 1..157: note = TNFR2-selective agonist TNF mutein A145H/E146S/S147D
VRSSSRTPSDKPVAHVVANPQAEGQLQWLNRRANALLANGVELRDNQLVVPSEGLYLIYSQVLFKGQGCPSTHVLLTHTISRIAVSYQTKVNLLSAIKSPCQRETPEGAEAKPWYEPIYLGGVFQLEKGDRLSAEINRPDYLDFHSDGQVYFGIIAL

SEQ ID NO: 786 - protein, 157 aa, synthetic construct
  REGION 1..157: note = TNFR2-selective agonist TNF mutein A145H/S147D
VRSSSRTPSDKPVAHVVANPQAEGQLQWLNRRANALLANGVELRDNQLVVPSEGLYLIYSQVLFKGQGCPSTHVLLTHTISRIAVSYQTKVNLLSAIKSPCQRETPEGAEAKPWYEPIYLGGVFQLEKGDRLSAEINRPDYLDFHEDGQVYFGIIAL

SEQ ID NO: 787 - protein, 157 aa, synthetic construct
  REGION 1..157: note = TNFR2-selective agonist TNF mutein L29V/A145D/E146D/S147D
VRSSSRTPSDKPVAHVVANPQAEGQLQWVNRRANALLANGVELRDNQLVVPSEGLYLIYSQVLFKGQGCPSTHVLLTHTISRIAVSYQTKVNLLSAIKSPCQRETPEGAEAKPWYEPIYLGGVFQLEKGDRLSAEINRPDYLDFDDDGQVYFGIIAL

SEQ ID NO: 788 - protein, 157 aa, synthetic construct
  REGION 1..157: note = TNFR2-selective agonist TNF mutein A145N/E146D/S147D
VRSSSRTPSDKPVAHVVANPQAEGQLQWLNRRANALLANGVELRDNQLVVPSEGLYLIYSQVLFKGQGCPSTHVLLTHTISRIAVSYQTKVNLLSAIKSPCQRETPEGAEAKPWYEPIYLGGVFQLEKGDRLSAEINRPDYLDFNDDGQVYFGIIAL

SEQ ID NO: 789 - protein, 157 aa, synthetic construct
  REGION 1..157: note = TNFR2-selective agonist TNF mutein A145T/E146S/S147D
VRSSSRTPSDKPVAHVVANPQAEGQLQWLNRRANALLANGVELRDNQLVVPSEGLYLIYSQVLFKGQGCPSTHVLLTHTISRIAVSYQTKVNLLSAIKSPCQRETPEGAEAKPWYEPIYLGGVFQLEKGDRLSAEINRPDYLDFTSDGQVYFGIIAL

SEQ ID NO: 790 - protein, 157 aa, synthetic construct
  REGION 1..157: note = TNFR2-selective agonist TNF mutein A145Q/E146D/S147D
VRSSSRTPSDKPVAHVVANPQAEGQLQWLNRRANALLANGVELRDNQLVVPSEGLYLIYSQVLFKGQGCPSTHVLLTHTISRIAVSYQTKVNLLSAIKSPCQRETPEGAEAKPWYEPIYLGGVFQLEKGDRLSAEINRPDYLDFQDDGQVYFGIIAL

SEQ ID NO: 791 - protein, 157 aa, synthetic construct
  REGION 1..157: note = TNFR2-selective agonist TNF mutein A145T/E146D/S147D
VRSSSRTPSDKPVAHVVANPQAEGQLQWLNRRANALLANGVELRDNQLVVPSEGLYLIYSQVLFKGQGCPSTHVLLTHTISRIAVSYQTKVNLLSAIKSPCQRETPEGAEAKPWYEPIYLGGVFQLEKGDRLSAEINRPDYLDFTDDGQVYFGIIAL

SEQ ID NO: 792 - protein, 157 aa, synthetic construct
  REGION 1..157: note = TNFR2-selective agonist TNF mutein A145D/E146G/S147D
VRSSSRTPSDKPVAHVVANPQAEGQLQWLNRRANALLANGVELRDNQLVVPSEGLYLIYSQVLFKGQGCPSTHVLLTHTISRIAVSYQTKVNLLSAIKSPCQRETPEGAEAKPWYEPIYLGGVFQLEKGDRLSAEINRPDYLDFDGDGQVYFGIIAL

SEQ ID NO: 793 - protein, 157 aa, synthetic construct
  REGION 1..157: note = TNFR2-selective agonist TNF mutein A145D/S147D
VRSSSRTPSDKPVAHVVANPQAEGQLQWLNRRANALLANGVELRDNQLVVPSEGLYLIYSQVLFKGQGCPSTHVLLTHTISRIAVSYQTKVNLLSAIKSPCQRETPEGAEAKPWYEPIYLGGVFQLEKGDRLSAEINRPDYLDFDEDGQVYFGIIAL

SEQ ID NO: 794 - protein, 157 aa, synthetic construct
  REGION 1..157: note = TNFR2-selective agonist TNF mutein A145K/E146D/S147T
VRSSSRTPSDKPVAHVVANPQAEGQLQWLNRRANALLANGVELRDNQLVVPSEGLYLIYSQVLFKGQGCPSTHVLLTHTISRIAVSYQTKVNLLSAIKSPCQRETPEGAEAKPWYEPIYLGGVFQLEKGDRLSAEINRPDYLDFKDTGQVYFGIIAL

SEQ ID NO: 795 - protein, 157 aa, synthetic construct
  REGION 1..157: note = TNFR2-selective agonist TNF mutein A145R/E146T/S147D
VRSSSRTPSDKPVAHVVANPQAEGQLQWLNRRANALLANGVELRDNQLVVPSEGLYLIYSQVLFKGQGCPSTHVLLTHTISRIAVSYQTKVNLLSAIKSPCQRETPEGAEAKPWYEPIYLGGVFQLEKGDRLSAEINRPDYLDFRTDGQVYFGIIAL

SEQ ID NO: 796 - protein, 157 aa, synthetic construct; identical to SEQ ID NO: 782
  REGION 1..157: note = TNFR2-selective agonist TNF mutein A145R/S147T

SEQ ID NO: 797 - protein, 157 aa, synthetic construct
  REGION 1..157: note = TNFR2-selective agonist TNF mutein E146D/S147D
VRSSSRTPSDKPVAHVVANPQAEGQLQWLNRRANALLANGVELRDNQLVVPSEGLYLIYSQVLFKGQGCPSTHVLLTHTISRIAVSYQTKVNLLSAIKSPCQRETPEGAEAKPWYEPIYLGGVFQLEKGDRLSAEINRPDYLDFADDGQVYFGIIAL

SEQ ID NO: 798 - protein, 157 aa, synthetic construct
  REGION 1..157: note = TNFR2-selective agonist TNF mutein D143V/F144L/A145S
VRSSSRTPSDKPVAHVVANPQAEGQLQWLNRRANALLANGVELRDNQLVVPSEGLYLIYSQVLFKGQGCPSTHVLLTHTISRIAVSYQTKVNLLSAIKSPCQRETPEGAEAKPWYEPIYLGGVFQLEKGDRLSAEINRPDYLVLSESGQVYFGIIAL

SEQ ID NO: 799 - protein, 157 aa, synthetic construct
  REGION 1..157: note = TNFR2-selective agonist TNF mutein D143V/A145S
VRSSSRTPSDKPVAHVVANPQAEGQLQWLNRRANALLANGVELRDNQLVVPSEGLYLIYSQVLFKGQGCPSTHVLLTHTISRIAVSYQTKVNLLSAIKSPCQRETPEGAEAKPWYEPIYLGGVFQLEKGDRLSAEINRPDYLVFSESGQVYFGIIAL

SEQ ID NO: 800 - protein, 157 aa, synthetic construct
  REGION 1..157: note = TNF07 (TNFR2-selective agonist TNF mutein S95C/G148C)
VRSSSRTPSDKPVAHVVANPQAEGQLQWLNRRANALLANGVELRDNQLVVPSEGLYLIYSQVLFKGQGCPSTHVLLTHTISRIAVSYQTKVNLLCAIKSPCQRETPEGAEAKPWYEPIYLGGVFQLEKGDRLSAEINRPDYLDFAESCQVYFGIIAL

SEQ ID NO: 801 - protein, 157 aa, synthetic construct
  REGION 1..157: note = TNFR2-selective TNF mutein A145T
VRSSSRTPSDKPVAHVVANPQAEGQLQWLNRRANALLANGVELRDNQLVVPSEGLYLIYSQVLFKGQGCPSTHVLLTHTISRIAVSYQTKVNLLSAIKSPCQRETPEGAEAKPWYEPIYLGGVFQLEKGDRLSAEINRPDYLDFTESGQVYFGIIAL

SEQ ID NO: 802 - protein, 157 aa, synthetic construct
  REGION 1..157: note = DN-TNF L57Y
VRSSSRTPSDKPVAHVVANPQAEGQLQWLNRRANALLANGVELRDNQLVVPSEGLYYIYSQVLFKGQGCPSTHVLLTHTISRIAVSYQTKVNLLSAIKSPCQRETPEGAEAKPWYEPIYLGGVFQLEKGDRLSAEINRPDYLDFAESGQVYFGIIAL

SEQ ID NO: 803 - protein, 472 aa, synthetic construct
  REGION 1..472: note = scTNFR2 (human TNFR2-selective single chain agonist TNF mutein trimer D143N/A145R)
SSRTPSDKPVAHVVANPQAEGQLQWLNRRANALLANGVELRDNQLVVPSEGLYLIYSQVLFKGQGCPSTHVLLTHTISRIAVSYQTKVNLLSAIKSPCQRETPEGAEAKPWYEPIYLGGVFQLEKGDRLSAEINRPDYLNFRESGQVYFGIIALGGGGSSSRTPSDKPVAHVVANPQAEGQLQWLNRRANALLANGVELRDNQLVVPSEGLYLIYSQVLFKGQGCPSTHVLLTHTISRIAVSYQTKVNLLSAIKSPCQRETPEGAEAKPWYEPIYLGGVFQLEKGDRLSAEINRPDYLNFRESGQVYFGIIALGGGGSSSRTPSDKPVAHVVANPQAEGQLQWLNRRANALLANGVELRDNQLVVPSEGLYLIYSQVLFKGQGCPSTHVLLTHTISRIAVSYQTKVNLLSAIKSPCQRETPEGAEAKPWYEPIYLGGVFQLEKGDRLSAEINRPDYLNFRESGQVYFGIIAL

SEQ ID NO: 804 - protein, 1808 aa, Gallus gallus
  REGION 1..1808: note = chicken tenascin C (TNC)
  DOMAIN 110..139: note = trimerization domain
MGLPSQVLACAILGLLYQHASGGLIKRIIRQKRETGLNVTLPEDNQPVVFNHVYNIKLPVGSLCSVDLDTASGDADLKAEIEPVKNYEEHTVNEGNQIVFTHRINIPRRACGCAAAPDIKDLLSRLEELEGLVSSLREQCASGAGCCPNSQTAEGRLDTAPYCSGHGNYSTEICGCVCEPGWKGPNCSEPACPRNCLNRGLCVRGKCICEEGFTGEDCSQAACPSDCNDQGKCVDGVCVCFEGYTGPDCGEELCPHGCGIHGRCVGGRCVCHEGFTGEDCNEPLCPNNCHNRGRCVDNECVCDEGYTGEDCGELICPNDCFDRGRCINGTCFCEEGYTGEDCGELTCPNNCNGNGRCENGLCVCHEGFVGDDCSQKRCPKDCNNRGHCVDGRCVCHEGYLGEDCGELRCPNDCHNRGRCINGQCVCDEGFIGEDCGELRCPNDCHNRGRCVNGQCECHEGFIGEDCGELRCPNDCNSHGRCVNGQCVCDEGYTGEDCGELRCPNDCHNRGRCVEGRCVCDNGFMGEDCGELSCPNDCHQHGRCVDGRCVCHEGFTGEDCRERSCPNDCNNVGRCVEGRCVCEEGYMGIDCSDVSPPTELTVTNVTDKTVNLEWKHENLVNEYLVTYVPTSSGGLDLQFTVPGNQTSATIHELEPGVEYFIRVFAILKNKKSIPVSARVATYLPAPEGLKFKSVRETSVQVEWDPLSISFDGWELVFRNMQKKDDNGDITSSLKRPETSYMQPGLAPGQQYNVSLHIVKNNTRGPGLSRVITTKLDAPSQIEAKDVTDTTALITWSKPLAEIEGIELTYGPKDVPGDRTTIDLSEDENQYSIGNLRPHTEYEVTLISRRGDMESDPAKEVFVTDLDAPRNLKRVSQTDNSITLEWKNSHANIDNYRIKFAPISGGDHTELTVPKGNQATTRATLTGLRPGTEYGIGVTAVRQDRESAPATINAGTDLDNPKDLEVSDPTETTLSLRWRRPVAKFDRYRLTYVSPSGKKNEMEIPVDSTSFILRGLDAGTEYTISLVAEKGRHKSKPTTIKGSTEEEPELGNLSVSETGWDGFQLTWTAADGAYENFVIQVQQSDNPEETWNITVPGGQHSVNVTGLKANTPYNVTLYGVIRGYRTKPLYVETTTGAHPEVGELTVSDITPESFNLSWTTTNGDFDAFTIEIIDSNRLLEPMEFNISGNSRTAHISGLSPSTDFIVYLYGISHGFRTQAISAAATTEAEPEVDNLLVSDATPDGFRLSWTADDGVFDSFVLKIRDTKRKSDPLELIVPGHERTHDITGLKEGTEYEIELYGVSSGRRSQPINSVATTVVGSPKGISFSDITENSATVSWTPPRSRVDSYRVSYVPITGGTPNVVTVDGSKTRTKLVKLVPGVDYNVNIISVKGFEESEPISGILKTALDSPSGLVVMNITDSEALATWQPAIAAVDNYIVSYSSEDEPEVTQMVSGNTVEYDLNGLRPATEYTLRVHAVKDAQKSETLSTQFTTGLDAPKDLSATEVQSETAVITWRPPRAPVTDYLLTYESIDGRVKEVILDPETTSYTLTELSPSTQYTVKLQALSRSMRSKMIQTVFTTTGLLYPYPKDCSQALLNGEVTSGLYTIYLNGDRTQPLQVFCDMAEDGGGWIVFLRRQNGKEDFYRNWKNYVAGFGDPKDEFWIGLENLHKISSQGQYELRVDLRDRGETAYAVYDKFSVGDAKTRYRLRVDGYSGTAGDSMTYHNGRSFSTFDKDNDSAITNCALSYKGAFWYKNCHRVNLMGRYGDNNHSQGVNWFHWKGHEYSIQFAEMKLRPSSFRNLEGRRKRA

SEQ ID NO: 805 - protein, 30 aa, Gallus gallus
  REGION 1..30: note = trimerization domain of Chicken Tenascin C (TNC)
ACGCAAAPDIKDLLSRLEELEGLVSSLREQ

SEQ ID NO: 806 - protein, 2201 aa, Homo sapiens
  REGION 1..2201: note = human tenascin C (TNC)
  DOMAIN 110..139: note = trimerization domain
MGAMTQLLAGVFLAFLALATEGGVLKKVIRHKRQSGVNATLPEENQPVVFNHVYNIKLPVGSQCSVDLESASGEKDLAPPSEPSESFQEHTVDGENQIVFTHRINIPRRACGCAAAPDVKELLSRLEELENLVSSLREQCTAGAGCCLQPATGRLDTRPFCSGRGNFSTEGCGCVCEPGWKGPNCSEPECPGNCHLRGRCIDGQCICDDGFTGEDCSQLACPSDCNDQGKCVNGVCICFEGYAGADCSREICPVPCSEEHGTCVDGLCVCHDGFAGDDCNKPLCLNNCYNRGRCVENECVCDEGFTGEDCSELICPNDCFDRGRCINGTCYCEEGFTGEDCGKPTCPHACHTQGRCEEGQCVCDEGFAGVDCSEKRCPADCHNRGRCVDGRCECDDGFTGADCGELKCPNGCSGHGRCVNGQCVCDEGYTGEDCSQLRCPNDCHSRGRCVEGKCVCEQGFKGYDCSDMSCPNDCHQHGRCVNGMCVCDDGYTGEDCRDRQCPRDCSNRGLCVDGQCVCEDGFTGPDCAELSCPNDCHGQGRCVNGQCVCHEGFMGKDCKEQRCPSDCHGQGRCVDGQCICHEGFTGLDCGQHSCPSDCNNLGQCVSGRCICNEGYSGEDCSEVSPPKDLVVTEVTEETVNLAWDNEMRVTEYLVVYTPTHEGGLEMQFRVPGDQTSTIIQELEPGVEYFIRVFAILENKKSIPVSARVATYLPAPEGLKFKSIKETSVEVEWDPLDIAFETWEIIFRNMNKEDEGEITKSLRRPETSYRQTGLAPGQEYEISLHIVKNNTRGPGLKRVTTTRLDAPSQIEVKDVTDTTALITWFKPLAEIDGIELTYGIKDVPGDRTTIDLTEDENQYSIGNLKPDTEYEVSLISRRGDMSSNPAKETFTTGLDAPRNLRRVSQTDNSITLEWRNGKAAIDSYRIKYAPISGGDHAEVDVPKSQQATTKTTLTGLRPGTEYGIGVSAVKEDKESNPATINAATELDTPKDLQVSETAETSLTLLWKTPLAKFDRYRLNYSLPTGQWVGVQLPRNTTSYVLRGLEPGQEYNVLLTAEKGRHKSKPARVKASTEQAPELENLTVTEVGWDGLRLNWTAADQAYEHFIIQVQEANKVEAARNLTVPGSLRAVDIPGLKAATPYTVSIYGVIQGYRTPVLSAEASTGETPNLGEVVVAEVGWDALKLNWTAPEGAYEYFFIQVQEADTVEAAQNLTVPGGLRSTDLPGLKAATHYTITIRGVTQDFSTTPLSVEVLTEEVPDMGNLTVTEVSWDALRLNWTTPDGTYDQFTIQVQEADQVEEAHNLTVPGSLRSMEIPGLRAGTPYTVTLHGEVRGHSTRPLAVEVVTEDLPQLGDLAVSEVGWDGLRLNWTAADNAYEHFVIQVQEVNKVEAAQNLTLPGSLRAVDIPGLEAATPYRVSIYGVIRGYRTPVLSAEASTAKEPEIGNLNVSDITPESFNLSWMATDGIFETFTIEIIDSNRLLETVEYNISGAERTAHISGLPPSTDFIVYLSGLAPSIRTKTISATATTEALPLLENLTISDINPYGFTVSWMASENAFDSFLVTVVDSGKLLDPQEFTLSGTQRKLELRGLITGIGYEVMVSGFTQGHQTKPLRAEIVTEAEPEVDNLLVSDATPDGFRLSWTADEGVFDNFVLKIRDTKKQSEPLEITLLAPERTRDITGLREATEYEIELYGISKGRRSQTVSAIATTAMGSPKEVIFSDITENSATVSWRAPTAQVESFRITYVPITGGTPSMVTVDGTKTQTRLVKLIPGVEYLVSIIAMKGFEESEPVSGSFTTALDGPSGLVTANITDSEALARWQPAIATVDSYVISYTGEKVPEITRTVSGNTVEYALTDLEPATEYTLRIFAEKGPQKSSTITAKFTTDLDSPRDLTATEVQSETALLTWRPPRASVTGYLLVYESVDGTVKEVIVGPDTTSYSLADLSPSTHYTAKIQALNGPLRSNMIQTIFTTIGLLYPFPKDCSQAMLNGDTTSGLYTIYLNGDKAEALEVFCDMTSDGGGWIVFLRRKNGRENFYQNWKAYAAGFGDRREEFWLGLDNLNKITAQGQYELRVDLRDHGETAFAVYDKFSVGDAKTRYKLKVEGYSGTAGDSMAYHNGRSFSTFDKDTDSAITNCALSYKGAFWYRNCHRVNLMGRYGDNNHSQGVNWFHWKGHEHSIQFAEMKLRPSNFRNLEGRRKRA

SEQ ID NO: 807 - protein, 30 aa, Homo sapiens
  REGION 1..30: note = trimerization domain of human tenascin C (TNC)
ACGCAAAPDVKELLSRLEELENLVSSLREQ

SEQ ID NO: 808 - protein, 106 aa, synthetic construct
  REGION 1..106: note = EHD2 dimerization domain
DFTPPTVKILQSSCDGGGHFPPTIQLLCLVSGYTPGTINITWLEDGQVMDVDLSTASTTQEGELASTQSELTLSQKHWLSDRTYTCQVTYQGHTFEDSTKKCADSN

SEQ ID NO: 809 - protein, 27 aa, synthetic construct
  REGION 1..27: note = Peptide linker between EHD2 and scTNFR2 in EHD2-scTNFR2
GGGSGGGSGGGSGGGSGGGSGGSEFLA

SEQ ID NO: 810 - protein, 605 aa, synthetic construct
  REGION 1..605: note = EHD2-scTNFR2
DFTPPTVKILQSSCDGGGHFPPTIQLLCLVSGYTPGTINITWLEDGQVMDVDLSTASTTQEGELASTQSELTLSQKHWLSDRTYTCQVTYQGHTFEDSTKKCADSNGGGSGGGSGGGSGGGSGGGSGGSEFLASSRTPSDKPVAHVVANPQAEGQLQWLNRRANALLANGVELRDNQLVVPSEGLYLIYSQVLFKGQGCPSTHVLLTHTISRIAVSYQTKVNLLSAIKSPCQRETPEGAEAKPWYEPIYLGGVFQLEKGDRLSAEINRPDYLNFRESGQVYFGIIALGGGGSSSRTPSDKPVAHVVANPQAEGQLQWLNRRANALLANGVELRDNQLVVPSEGLYLIYSQVLFKGQGCPSTHVLLTHTISRIAVSYQTKVNLLSAIKSPCQRETPEGAEAKPWYEPIYLGGVFQLEKGDRLSAEINRPDYLNFRESGQVYFGIIALGGGGSSSRTPSDKPVAHVVANPQAEGQLQWLNRRANALLANGVELRDNQLVVPSEGLYLIYSQVLFKGQGCPSTHVLLTHTISRIAVSYQTKVNLLSAIKSPCQRETPEGAEAKPWYEPIYLGGVFQLEKGDRLSAEINRPDYLNFRESGQVYFGIIAL

SEQ ID NO: 811 - protein, 111 aa, synthetic construct
  REGION 1..111: note = MHD2 (IgM dimerization domain)
AELPPKVSVFVPPRDGFFGNPRKSKLICQATGFSPRQIQVSWLREGKQVGSGVTTDQVQAEAKESGPTTYKVTSTLTIKESDWLGQSMFTCRVDHRGLTFQQNASSMCVPD

SEQ ID NO: 812 - protein, 31 aa, synthetic construct
  REGION 1..31: note = stalk region of TNF that can be used as a linker in scTNFR2-Fc
GPQREEFPRDLSLISPLAQAVRSSSRTPSDK

SEQ ID NO: 813 - protein, 6 aa, synthetic construct
  REGION 1..6: note = partial trastuzumab hinge sequence
SCDKTH

SEQ ID NO: 814 - protein, 15 aa, synthetic construct
  REGION 1..15: note = trastuzumab hinge sequence
EPKSCDKTHTCPPCP

SEQ ID NO: 815 - protein, 12 aa, synthetic construct
  REGION 1..12: note = nivolumab hinge sequence
ESKYGPPCPPCP

SEQ ID NO: 816 - protein, 4 aa, synthetic construct
  REGION 1..4: note = GS linker
GSGS

SEQ ID NO: 817 - protein, 5 aa, synthetic construct
  REGION 1..5: note = GS linker
GGGGS

SEQ ID NO: 818 - protein, 15 aa, synthetic construct
  REGION 1..15: note = GS linker
GGGGSGGGGSGGGGS

SEQ ID NO: 819 - protein, 20 aa, synthetic construct
  REGION 1..20: note = GS linker
GGGGSGGGGSGGGGSGGGGS

SEQ ID NO: 820 - protein, 8 aa, synthetic construct
  REGION 1..8: note = GS linker
GSGGSSGG

SEQ ID NO: 821 - protein, 12 aa, synthetic construct
  REGION 1..12: note = GS linker
GSSSGSGSGSSG

SEQ ID NO: 822 - protein, 13 aa, synthetic construct
  REGION 1..13: note = GS linker
GSSSGSGSGSSGG

SEQ ID NO: 823 - protein, 6 aa, synthetic construct
  REGION 1..6: note = GS linker
GGSSGG

SEQ ID NO: 824 - protein, 13 aa, synthetic construct
  REGION 1..13: note = GS linker
GGSSGGSGGSSSG

SEQ ID NO: 825 - protein, 18 aa, synthetic construct
  REGION 1..18: note = GS linker
GSSSGSGSGGSSSGSGSG

SEQ ID NO: 826 - protein, 18 aa, synthetic construct
  REGION 1..18: note = GS linker
GGSSGGSSGGGSSGGSSG

SEQ ID NO: 827 - protein, 6 aa, synthetic construct
  REGION 1..6: note = GS linker
GSSSGS

SEQ ID NO: 828 - protein, 12 aa, synthetic construct
  REGION 1..12: note = linker sequence
GSAGSAAGSGEF

SEQ ID NO: 829 - protein, 18 aa, synthetic construct
  REGION 1..18: note = linker sequence
KESGSVSSEQLAQFRSLD

SEQ ID NO: 830 - protein, 14 aa, synthetic construct
  REGION 1..14: note = linker sequence
EGKSSGSGSESKST

SEQ ID NO: 831 - protein, 5 aa, synthetic construct
  REGION 1..5: note = Alpha helix-forming linker, (EAAAK)n
  REPEAT 1..5: note = occuring n times, where n= 1 to 10
EAAAK

SEQ ID NO: 832 - protein, 7 aa, synthetic construct
  REGION 1..7: note = rigid linker, A(EAAAK)nA, where n = 2 to 5
  REPEAT 2..6: note = occurring 2, 3, 4, or 5 times
AEAAAKA

SEQ ID NO: 833 - protein, 18 aa, synthetic construct
  REGION 1..18: note = C-terminal extension from human IgG linker
ELQLEESSAEAQDGELDG

SEQ ID NO: 834 - protein, 14 aa, synthetic construct
  REGION 1..14: note = C-terminal extension from human IgG variant linker
ELQLEESSAEAQGG

SEQ ID NO: 835 - protein, 20 aa, synthetic construct
  REGION 1..20: note = human immunoglobulin light chain kappa leader signal peptide sequence; human Ig kappa chain V-III region signal peptide (IgGkSP)
METDTLLLWVLLLWVPGSTG

SEQ ID NO: 836 - protein, 6 aa, synthetic construct
  REGION 1..6: note = 6xHis tag
HHHHHH

SEQ ID NO: 837 - protein, 100 aa, synthetic construct
  REGION 1..100: note = SUMO sequence
GSLQDSEVNQEAKPEVKPEVKPETHINLKVSDGSSEIFFKIKKTTPLRRLMEAFAKRQGKEMDSLRFLYDGIRIQADQAPEDLDMEDNDIIEAHREQIGG

SEQ ID NO: 838 - protein, 108 aa, synthetic construct
  REGION 1..108: note = His tag-SUMO sequence
MGHHHHHHGSLQDSEVNQEAKPEVKPEVKPETHINLKVSDGSSEIFFKIKKTTPLRRLMEAFAKRQGKEMDSLRFLYDGIRIQADQAPEDLDMEDNDIIEAHREQIGG

SEQ ID NO: 839 - protein, 5 aa, synthetic construct
  REGION 1..5: note = human TNFR2 epitope
KCSPG

SEQ ID NO: 840 - protein, 5 aa, synthetic construct
  REGION 1..5: note = human TNFR2 epitope
KCRPG

SEQ ID NO: 841 - protein, 59 aa, synthetic construct
  REGION 1..59: note = human TNFR2 epitope
CGSRCSSDQVETQACTREQNRICTCRPGWYCALSKQEGCRLCAPLRKCRPGFGVARPGT

SEQ ID NO: 842 - protein, 40 aa, synthetic construct
  REGION 1..40: note = human TNFR2 epitope
TREQNRICTCRPGWYCALSKQEGCRLCAPLRKCRPGFGVA

SEQ ID NO: 843 - protein, 28 aa, synthetic construct
  REGION 1..28: note = human TNFR2 epitope
NRICTCRPGWYCALSKQEGCRLCAPLRK

SEQ ID NO: 844 - protein, 15 aa, synthetic construct
  REGION 1..15: note = human TNFR2 epitope
PGWYCALSKQEGCRL

SEQ ID NO: 845 - protein, 17 aa, synthetic construct
  REGION 1..17: note = human TNFR2 epitope
CGSRCSSDQVETQACTR

SEQ ID NO: 846 - protein, 7 aa, synthetic construct
  REGION 1..7: note = human TNFR2 epitope
SSDQVET

SEQ ID NO: 847 - protein, 20 aa, synthetic construct
  REGION 1..20: note = human TNFR2 epitope
QTAQMCCSKCSPGQHAKVFC

SEQ ID NO: 848 - protein, 20 aa, synthetic construct
  REGION 1..20: note = human TNFR2 epitope
KQEGCRLCAPLRKCRPGFGV

SEQ ID NO: 849 - protein, 38 aa, synthetic construct
  REGION 1..38: note = human TNFR2 epitope
CTREQNRICTCRPGWYCALSKQEGCRLCAPLRKCRPGF

SEQ ID NO: 850 - protein, 50 aa, synthetic construct
  REGION 1..50: note = human TNFR2 epitope
ETQACTREQNRICTCRPGWYCALSKQEGCRLCAPLRKCRPGFGVARPGTE

SEQ ID NO: 851 - protein, 8 aa, synthetic construct
  REGION 1..8: note = human TNFR2 epitope
CAPLRKCR

SEQ ID NO: 852 - protein, 9 aa, synthetic construct
  REGION 1..9: note = human TNFR2 epitope
RKCRPGFGV

SEQ ID NO: 853 - protein, 15 aa, synthetic construct
  REGION 1..15: note = peptide sequence within human TNFR2 that represents epitope that TNFR2 agonist antibodies or fragments thereof can bind to
CRPHQICNVVAIPGN

SEQ ID NO: 854 - protein, 15 aa, synthetic construct
  REGION 1..15: note = peptide sequence within human TNFR2 that represents epitope that TNFR2 agonist antibodies or fragments thereof can bind to
CRPHQICNVVGAPGN

SEQ ID NO: 855 - protein, 15 aa, synthetic construct
  REGION 1..15: note = peptide sequence within human TNFR2 that represents epitope that TNFR2 agonist antibodies or fragments thereof can bind to
QEGCRLCAPLAACRP

SEQ ID NO: 856 - protein, 15 aa, synthetic construct
  REGION 1..15: note = peptide sequence within human TNFR2 that represents epitope that TNFR2 agonist antibodies or fragments thereof can bind to
TFSNTTSSTDAARPH

SEQ ID NO: 857 - protein, 15 aa, synthetic construct
  REGION 1..15: note = peptide sequence within human TNFR2 that represents epitope that TNFR2 agonist antibodies or fragments thereof can bind to
PSTSFLLPMGPSPPA

SEQ ID NO: 858 - protein, 15 aa, synthetic construct
  REGION 1..15: note = peptide sequence within human TNFR2 that represents epitope that TNFR2 agonist antibodies or fragments thereof can bind to
QVETQACTREQNRIC

SEQ ID NO: 859 - protein, 15 aa, synthetic construct
  REGION 1..15: note = peptide sequence within human TNFR2 that represents epitope that TNFR2 agonist antibodies or fragments thereof can bind to
LWNWVPECLSCGSRC

SEQ ID NO: 860 - protein, 15 aa, synthetic construct
  REGION 1..15: note = peptide sequence within human TNFR2 that represents epitope that TNFR2 agonist antibodies or fragments thereof can bind to
QLWNWVPECLSCGSR

SEQ ID NO: 861 - protein, 15 aa, synthetic construct
  REGION 1..15: note = peptide sequence within human TNFR2 that represents epitope that TNFR2 agonist antibodies or fragments thereof can bind to
QACTREQNRICTCRP

SEQ ID NO: 862 - protein, 15 aa, synthetic construct
  REGION 1..15: note = peptide sequence within human TNFR2 that represents epitope that TNFR2 agonist antibodies or fragments thereof can bind to
TFSNTTSSTDICRPH

SEQ ID NO: 863 - protein, 15 aa, synthetic construct
  REGION 1..15: note = peptide sequence within human TNFR2 that represents epitope that TNFR2 agonist antibodies or fragments thereof can bind to
PGWYCALSKQEGCRL

SEQ ID NO: 864 - protein, 16 aa, synthetic construct
  REGION 1..16: note = peptide sequence within human TNFR2 that represents epitope that TNFR2 agonist antibodies or fragments thereof can bind to
CQLWNWVPEALAGGSR

SEQ ID NO: 865 - protein, 27 aa, synthetic construct
  REGION 1..27: note = peptide sequence within human TNFR2 that represents epitope that TNFR2 agonist antibodies or fragments thereof can bind to
  VARIANT 3: note = Xaa is Cys residue protected with ACM protecting group
  VARIANT 25: note = Xaa is Cys residue protected with ACM protecting group
LSXGSRCSSDQGGSGGREQNRICTXRP

SEQ ID NO: 866 - protein, 15 aa, synthetic construct
  REGION 1..15: note = peptide sequence within human TNFR2 that represents epitope that TNFR2 agonist antibodies or fragments thereof can bind to
WNWVPECLSCAARCS

SEQ ID NO: 867 - protein, 27 aa, synthetic construct
  REGION 1..27: note = peptide sequence within human TNFR2 that represents epitope that TNFR2 agonist antibodies or fragments thereof can bind to
  VARIANT 8: note = Xaa is Cys residue protected with ACM protecting group
  VARIANT 27: note = Xaa is Cys residue protected with ACM protecting group
LWNWVPEXLSCGGSGGQACTREQNRIX

SEQ ID NO: 868 - protein, 15 aa, synthetic construct
  REGION 1..15: note = peptide sequence within human TNFR2 that represents epitope that TNFR2 agonist antibodies or fragments thereof can bind to
PLRKCRPGFGVARPG

SEQ ID NO: 869 - protein, 27 aa, synthetic construct
  REGION 1..27: note = peptide sequence within human TNFR2 that represents epitope that TNFR2 agonist antibodies or fragments thereof can bind to
  VARIANT 1: note = Xaa is Cys residue protected with ACM protecting group
  VARIANT 25: note = Xaa is Cys residue protected with ACM protecting group
XGSRCSSDQVEGGSGGREQNRICTXRP

SEQ ID NO: 870 - protein, 27 aa, synthetic construct
  REGION 1..27: note = peptide sequence within human TNFR2 that represents epitope that TNFR2 agonist antibodies or fragments thereof can bind to
  VARIANT 3: note = Xaa is Cys residue protected with ACM protecting group
  VARIANT 6: note = Xaa is Cys residue protected with ACM protecting group
  VARIANT 25: note = Xaa is Cys residue protected with ACM protecting group
PEXLSXGSRCSGGSGGREQNRICTXRP

SEQ ID NO: 871 - protein, 27 aa, synthetic construct
  REGION 1..27: note = peptide sequence within human TNFR2 that represents epitope that TNFR2 agonist antibodies or fragments thereof can bind to
  VARIANT 8: note = Xaa is Cys residue protected with ACM protecting group
  VARIANT 26: note = Xaa is Cys residue protected with ACM protecting group
LWNWVPEXLSCGGSGGACTREQNRIXT

SEQ ID NO: 872 - protein, 15 aa, synthetic construct
  REGION 1..15: note = peptide sequence within human TNFR2 that represents epitope that TNFR2 agonist antibodies or fragments thereof can bind to
QLWNWVPECLAAGSR

SEQ ID NO: 873 - protein, 27 aa, synthetic construct
  REGION 1..27: note = peptide sequence within human TNFR2 that represents epitope that TNFR2 agonist antibodies or fragments thereof can bind to
  VARIANT 11: note = Xaa is Cys residue protected with ACM protecting group
  VARIANT 25: note = Xaa is Cys residue protected with ACM protecting group
CSSDQVETQAXGGSGGREQNRICTXRP

SEQ ID NO: 874 - protein, 15 aa, synthetic construct
  REGION 1..15: note = peptide sequence within human TNFR2 that represents epitope that TNFR2 agonist antibodies or fragments thereof can bind to
EQNRICTCRPAAYCA

SEQ ID NO: 875 - protein, 15 aa, synthetic construct
  REGION 1..15: note = peptide sequence within human TNFR2 that represents epitope that TNFR2 agonist antibodies or fragments thereof can bind to
TTSSTDICRPHQICN

SEQ ID NO: 876 - protein, 15 aa, synthetic construct
  REGION 1..15: note = peptide sequence within human TNFR2 that represents epitope that TNFR2 agonist antibodies or fragments thereof can bind to
ACTREQNRICTCRPG

SEQ ID NO: 877 - protein, 16 aa, synthetic construct
  REGION 1..16: note = peptide sequence within human TNFR2 that represents epitope that TNFR2 agonist antibodies or fragments thereof can bind to
CQLWNWVPEALSAGSR

SEQ ID NO: 878 - protein, 15 aa, synthetic construct
  REGION 1..15: note = peptide sequence within human TNFR2 that represents epitope that TNFR2 agonist antibodies or fragments thereof can bind to
RPHQICNVVAIPGNA

SEQ ID NO: 879 - protein, 27 aa, synthetic construct
  REGION 1..27: note = peptide sequence within human TNFR2 that represents epitope that TNFR2 agonist antibodies or fragments thereof can bind to
  VARIANT 25: note = Xaa is Cys residue protected with ACM protecting group
SRCSSDQVETQGGSGGREQNRICTXRP

SEQ ID NO: 880 - protein, 27 aa, synthetic construct
  REGION 1..27: note = peptide sequence within human TNFR2 that represents epitope that TNFR2 agonist antibodies or fragments thereof can bind to
  VARIANT 25: note = Xaa is Cys residue protected with ACM protecting group
GSRCSSDQVETGGSGGREQNRICTXRP

SEQ ID NO: 881 - protein, 27 aa, synthetic construct
  REGION 1..27: note = peptide sequence within human TNFR2 that represents epitope that TNFR2 agonist antibodies or fragments thereof can bind to
  VARIANT 3: note = Xaa is Cys residue protected with ACM protecting group
  VARIANT 24: note = Xaa is Cys residue protected with ACM protecting group
LSXGSRCSSDQGGSGGEQNRICTXRPG

SEQ ID NO: 882 - protein, 27 aa, synthetic construct
  REGION 1..27: note = peptide sequence within human TNFR2 that represents epitope that TNFR2 agonist antibodies or fragments thereof can bind to
  VARIANT 7: note = Xaa is Cys residue protected with ACM protecting group
QEGCRLXAPLRGGSGGCRPGFGVARPG

SEQ ID NO: 883 - protein, 15 aa, synthetic construct
  REGION 1..15: note = peptide sequence within human TNFR2 that represents epitope that TNFR2 agonist antibodies or fragments thereof can bind to
FSNTTSSTDICRPHQ

SEQ ID NO: 884 - protein, 15 aa, synthetic construct
  REGION 1..15: note = peptide sequence within human TNFR2 that represents epitope that TNFR2 agonist antibodies or fragments thereof can bind to
LWNWVPECLSAASRC

SEQ ID NO: 885 - protein, 15 aa, synthetic construct
  REGION 1..15: note = peptide sequence within human TNFR2 that represents epitope that TNFR2 agonist antibodies or fragments thereof can bind to
QTAQMCCSKCSPGQH

SEQ ID NO: 886 - protein, 27 aa, synthetic construct
  REGION 1..27: note = peptide sequence within human TNFR2 that represents epitope that TNFR2 agonist antibodies or fragments thereof can bind to
  VARIANT 2: note = Xaa is Cys residue protected with ACM protecting group
  VARIANT 5: note = Xaa is Cys residue protected with ACM protecting group
  VARIANT 25: note = Xaa is Cys residue protected with ACM protecting group
EXLSXGSRCSSGGSGGREQNRICTXRP

SEQ ID NO: 887 - protein, 33 aa, synthetic construct
  REGION 1..33: note = peptide sequence within human TNFR2 that represents epitope that TNFR2 agonist antibodies or fragments thereof can bind to
  VARIANT 7: note = Xaa is Cys residue protected with ACM protecting group
  VARIANT 9: note = Xaa is Cys residue protected with ACM protecting group
  VARIANT 15: note = Xaa is Cys residue protected with ACM protecting group
  VARIANT 25: note = Xaa is Cys residue protected with ACM protecting group
CEQNRIXTXRPGWYXACNASMDAVXTSTSPTRC

SEQ ID NO: 888 - protein, 27 aa, synthetic construct
  REGION 1..27: note = peptide sequence within human TNFR2 that represents epitope that TNFR2 agonist antibodies or fragments thereof can bind to
  VARIANT 4: note = Xaa is Cys residue protected with ACM protecting group
  VARIANT 7: note = Xaa is Cys residue protected with ACM protecting group
  VARIANT 25: note = Xaa is Cys residue protected with ACM protecting group
VPEXLSXGSRCGGSGGREQNRICTXRP

SEQ ID NO: 889 - protein, 27 aa, synthetic construct
  REGION 1..27: note = peptide sequence within human TNFR2 that represents epitope that TNFR2 agonist antibodies or fragments thereof can bind to
  VARIANT 7: note = Xaa is Cys residue protected with ACM protecting group
  VARIANT 27: note = Xaa is Cys residue protected with ACM protecting group
WNWVPEXLSCGGGSGGQACTREQNRIX

SEQ ID NO: 890 - protein, 27 aa, synthetic construct
  REGION 1..27: note = peptide sequence within human TNFR2 that represents epitope that TNFR2 agonist antibodies or fragments thereof can bind to
  VARIANT 8: note = Xaa is Cys residue protected with ACM protecting group
LWNWVPEXLSCGGSGGTQACTREQNRI

SEQ ID NO: 891 - protein, 27 aa, synthetic construct
  REGION 1..27: note = peptide sequence within human TNFR2 that represents epitope that TNFR2 agonist antibodies or fragments thereof can bind to
  VARIANT 4: note = Xaa is Cys residue protected with ACM protecting group
  VARIANT 7: note = Xaa is Cys residue protected with ACM protecting group
  VARIANT 19: note = Xaa is Cys residue protected with ACM protecting group
VPEXLSXGSRCGGSGGQAXTREQNRIC

SEQ ID NO: 892 - protein, 27 aa, synthetic construct
  REGION 1..27: note = peptide sequence within human TNFR2 that represents epitope that TNFR2 agonist antibodies or fragments thereof can bind to
  VARIANT 2: note = Xaa is Cys residue protected with ACM protecting group
  VARIANT 25: note = Xaa is Cys residue protected with ACM protecting group
SXGSRCSSDQVGGSGGREQNRICTXRP

SEQ ID NO: 893 - protein, 27 aa, synthetic construct
  REGION 1..27: note = peptide sequence within human TNFR2 that represents epitope that TNFR2 agonist antibodies or fragments thereof can bind to
  VARIANT 1: note = Xaa is Cys residue protected with ACM protecting group
  VARIANT 24: note = Xaa is Cys residue protected with ACM protecting group
XGSRCSSDQVEGGSGGEQNRICTXRPG

SEQ ID NO: 894 - protein, 15 aa, synthetic construct
  REGION 1..15: note = peptide sequence within human TNFR2 that represents epitope that TNFR2 agonist antibodies or fragments thereof can bind to
ACTREQNRICAARPG

SEQ ID NO: 895 - protein, 27 aa, synthetic construct
  REGION 1..27: note = peptide sequence within human TNFR2 that represents epitope that TNFR2 agonist antibodies or fragments thereof can bind to
  VARIANT 2: note = Xaa is Cys residue protected with ACM protecting group
  VARIANT 24: note = Xaa is Cys residue protected with ACM protecting group
SXGSRCSSDQVGGSGGEQNRICTXRPG

SEQ ID NO: 896 - protein, 15 aa, synthetic construct
  REGION 1..15: note = peptide sequence within human TNFR2 that represents epitope that TNFR2 agonist antibodies or fragments thereof can bind to
PLRKCRPGFGAGRPG

SEQ ID NO: 897 - protein, 15 aa, synthetic construct
  REGION 1..15: note = peptide sequence within human TNFR2 that represents epitope that TNFR2 agonist antibodies or fragments thereof can bind to
ICRPHQICNVAGIPG

SEQ ID NO: 898 - protein, 15 aa, synthetic construct
  REGION 1..15: note = peptide sequence within human TNFR2 that represents epitope that TNFR2 agonist antibodies or fragments thereof can bind to
GWYCALSKQEGCRLC

SEQ ID NO: 899 - protein, 15 aa, synthetic construct
  REGION 1..15: note = peptide sequence within human TNFR2 that represents epitope that TNFR2 agonist antibodies or fragments thereof can bind to
QACTREQNRIAACRP

SEQ ID NO: 900 - protein, 15 aa, synthetic construct
  REGION 1..15: note = peptide sequence within human TNFR2 that represents epitope that TNFR2 agonist antibodies or fragments thereof can bind to
WNWVPECLSCGSRCS

SEQ ID NO: 901 - protein, 27 aa, synthetic construct
  REGION 1..27: note = peptide sequence within human TNFR2 that represents epitope that TNFR2 agonist antibodies or fragments thereof can bind to
  VARIANT 1: note = Xaa is Cys residue protected with ACM protecting group
  VARIANT 4: note = Xaa is Cys residue protected with ACM protecting group
  VARIANT 23: note = Xaa is Cys residue protected with ACM protecting group
XLSXGSRCSSDGGSGGQNRICTXRPGW

SEQ ID NO: 902 - protein, 27 aa, synthetic construct
  REGION 1..27: note = peptide sequence within human TNFR2 that represents epitope that TNFR2 agonist antibodies or fragments thereof can bind to
  VARIANT 4: note = Xaa is Cys residue protected with ACM protecting group
  VARIANT 11: note = Xaa is Cys residue protected with ACM protecting group
  VARIANT 27: note = Xaa is Cys residue protected with ACM protecting group
VPEXLSCGSRXGGSGGQACTREQNRIX

SEQ ID NO: 903 - protein, 27 aa, synthetic construct
  REGION 1..27: note = peptide sequence within human TNFR2 that represents epitope that TNFR2 agonist antibodies or fragments thereof can bind to
  VARIANT 1: note = Xaa is Cys residue protected with ACM protecting group
  VARIANT 4: note = Xaa is Cys residue protected with ACM protecting group
  VARIANT 25: note = Xaa is Cys residue protected with ACM protecting group
XLSXGSRCSSDGGSGGREQNRICTXRP

SEQ ID NO: 904 - protein, 27 aa, synthetic construct
  REGION 1..27: note = peptide sequence within human TNFR2 that represents epitope that TNFR2 agonist antibodies or fragments thereof can bind to
  VARIANT 6: note = Xaa is Cys residue protected with ACM protecting group
EGCRLXAPLRKGGSGGCRPGFGVARPG

SEQ ID NO: 905 - protein, 27 aa, synthetic construct
  REGION 1..27: note = peptide sequence within human TNFR2 that represents epitope that TNFR2 agonist antibodies or fragments thereof can bind to
  VARIANT 19: note = Xaa is Cys residue protected with ACM protecting group
  VARIANT 22: note = Xaa is Cys residue protected with ACM protecting group
APEPGSTCRLRGGSGGMCXSKXSPGQH

SEQ ID NO: 906 - protein, 27 aa, synthetic construct
  REGION 1..27: note = peptide sequence within human TNFR2 that represents epitope that TNFR2 agonist antibodies or fragments thereof can bind to
  VARIANT 8: note = Xaa is Cys residue protected with ACM protecting group
  VARIANT 25: note = Xaa is Cys residue protected with ACM protecting group
  VARIANT 27: note = Xaa is Cys residue protected with ACM protecting group
LWNWVPEXLSCGGSGGCTREQNRIXTX

SEQ ID NO: 907 - protein, 27 aa, synthetic construct
  REGION 1..27: note = peptide sequence within human TNFR2 that represents epitope that TNFR2 agonist antibodies or fragments thereof can bind to
  VARIANT 8: note = Xaa is Cys residue protected with ACM protecting group
KQEGCRLXAPLGGSGGCRPGFGVARPG

SEQ ID NO: 908 - protein, 27 aa, synthetic construct
  REGION 1..27: note = peptide sequence within human TNFR2 that represents epitope that TNFR2 agonist antibodies or fragments thereof can bind to
  VARIANT 1: note = Xaa is Cys residue protected with ACM protecting group
XALSKQEGCRLGGSGGCRPGFGVARPG

SEQ ID NO: 909 - protein, 27 aa, synthetic construct
  REGION 1..27: note = peptide sequence within human TNFR2 that represents epitope that TNFR2 agonist antibodies or fragments thereof can bind to
  VARIANT 3: note = Xaa is Cys residue protected with ACM protecting group
WYXALSKQEGCGGSGGCRPGFGVARPG

SEQ ID NO: 910 - protein, 27 aa, synthetic construct
  REGION 1..27: note = peptide sequence within human TNFR2 that represents epitope that TNFR2 agonist antibodies or fragments thereof can bind to
  VARIANT 10: note = Xaa is Cys residue protected with ACM protecting group
LSKQEGCRLXAGGSGGCRPGFGVARPG

SEQ ID NO: 911 - protein, 27 aa, synthetic construct
  REGION 1..27: note = peptide sequence within human TNFR2 that represents epitope that TNFR2 agonist antibodies or fragments thereof can bind to
  VARIANT 24: note = Xaa is Cys residue protected with ACM protecting group
GSRCSSDQVETGGSGGEQNRICTXRPG

SEQ ID NO: 912 - protein, 27 aa, synthetic construct
  REGION 1..27: note = peptide sequence within human TNFR2 that represents epitope that TNFR2 agonist antibodies or fragments thereof can bind to
  VARIANT 11: note = Xaa is Cys residue protected with ACM protecting group
ALSKQEGCRLXGGSGGCRPGFGVARPG

SEQ ID NO: 913 - protein, 15 aa, synthetic construct
  REGION 1..15: note = peptide sequence within human TNFR2 that represents epitope that TNFR2 agonist antibodies or fragments thereof can bind to
RPGWYCALSKQEGCR

SEQ ID NO: 914 - protein, 15 aa, synthetic construct
  REGION 1..15: note = peptide sequence within human TNFR2 that represents epitope that TNFR2 agonist antibodies or fragments thereof can bind to
AFTPYAPEPGSTCRL

SEQ ID NO: 915 - protein, 27 aa, synthetic construct
  REGION 1..27: note = peptide sequence within human TNFR2 that represents epitope that TNFR2 agonist antibodies or fragments thereof can bind to
  VARIANT 25: note = Xaa is Cys residue protected with ACM protecting group
RCSSDQVETQAGGSGGREQNRICTXRP

SEQ ID NO: 916 - protein, 27 aa, synthetic construct
  REGION 1..27: note = peptide sequence within human TNFR2 that represents epitope that TNFR2 agonist antibodies or fragments thereof can bind to
  VARIANT 7: note = Xaa is Cys residue protected with ACM protecting group
  VARIANT 26: note = Xaa is Cys residue protected with ACM protecting group
WNWVPEXLSCGGGSGGACTREQNRIXT

SEQ ID NO: 917 - protein, 27 aa, synthetic construct
  REGION 1..27: note = peptide sequence within human TNFR2 that represents epitope that TNFR2 agonist antibodies or fragments thereof can bind to
  VARIANT 6: note = Xaa is Cys residue protected with ACM protecting group
TSDVVXKPCAPGGSGGTTSSTDICRPH

SEQ ID NO: 918 - protein, 15 aa, synthetic construct
  REGION 1..15: note = peptide sequence within human TNFR2 that represents epitope that TNFR2 agonist antibodies or fragments thereof can bind to
ICRPHQICNVVAIPG

SEQ ID NO: 919 - protein, 27 aa, synthetic construct
  REGION 1..27: note = peptide sequence within human TNFR2 that represents epitope that TNFR2 agonist antibodies or fragments thereof can bind to
  VARIANT 9: note = Xaa is Cys residue protected with ACM protecting group
  VARIANT 20: note = Xaa is Cys residue protected with ACM protecting group
RLCAPLRKXRPGGSGGCKPXAPGTFSN

SEQ ID NO: 920 - protein, 15 aa, synthetic construct
  REGION 1..15: note = peptide sequence within human TNFR2 that represents epitope that TNFR2 agonist antibodies or fragments thereof can bind to
PTRSMAPGAVHLPQP

SEQ ID NO: 921 - protein, 27 aa, synthetic construct
  REGION 1..27: note = peptide sequence within human TNFR2 that represents epitope that TNFR2 agonist antibodies or fragments thereof can bind to
  VARIANT 19: note = Xaa is Cys residue protected with ACM protecting group
  VARIANT 22: note = Xaa is Cys residue protected with ACM protecting group
YAPEPGSTCRLGGSGGMCXSKXSPGQH

SEQ ID NO: 922 - protein, 27 aa, synthetic construct
  REGION 1..27: note = peptide sequence within human TNFR2 that represents epitope that TNFR2 agonist antibodies or fragments thereof can bind to
  VARIANT 5: note = Xaa is Cys residue protected with ACM protecting group
  VARIANT 27: note = Xaa is Cys residue protected with ACM protecting group
WVPEXLSCGSRGGSGGQACTREQNRIX

SEQ ID NO: 923 - protein, 27 aa, synthetic construct
  REGION 1..27: note = peptide sequence within human TNFR2 that represents epitope that TNFR2 agonist antibodies or fragments thereof can bind to
  VARIANT 3: note = Xaa is Cys residue protected with ACM protecting group
  VARIANT 6: note = Xaa is Cys residue protected with ACM protecting group
  VARIANT 18: note = Xaa is Cys residue protected with ACM protecting group
PEXLSXGSRCSGGSGGAXTREQNRICT

SEQ ID NO: 924 - protein, 27 aa, synthetic construct
  REGION 1..27: note = peptide sequence within human TNFR2 that represents epitope that TNFR2 agonist antibodies or fragments thereof can bind to
  VARIANT 2: note = Xaa is Cys residue protected with ACM protecting group
  VARIANT 5: note = Xaa is Cys residue protected with ACM protecting group
  VARIANT 24: note = Xaa is Cys residue protected with ACM protecting group
EXLSXGSRCSSGGSGGEQNRICTXRPG

SEQ ID NO: 925 - protein, 27 aa, synthetic construct
  REGION 1..27: note = peptide sequence within human TNFR2 that represents epitope that TNFR2 agonist antibodies or fragments thereof can bind to
  VARIANT 3: note = Xaa is Cys residue protected with ACM protecting group
  VARIANT 10: note = Xaa is Cys residue protected with ACM protecting group
  VARIANT 27: note = Xaa is Cys residue protected with ACM protecting group
PEXLSCGSRXSGGSGGQACTREQNRIX

SEQ ID NO: 926 - protein, 27 aa, synthetic construct
  REGION 1..27: note = peptide sequence within human TNFR2 that represents epitope that TNFR2 agonist antibodies or fragments thereof can bind to
  VARIANT 5: note = Xaa is Cys residue protected with ACM protecting group
  VARIANT 26: note = Xaa is Cys residue protected with ACM protecting group
WVPEXLSCGSRGGSGGACTREQNRIXT

SEQ ID NO: 927 - protein, 27 aa, synthetic construct
  REGION 1..27: note = peptide sequence within human TNFR2 that represents epitope that TNFR2 agonist antibodies or fragments thereof can bind to
  VARIANT 19: note = Xaa is Cys residue protected with ACM protecting group
  VARIANT 22: note = Xaa is Cys residue protected with ACM protecting group
PGSTCRLREYYGGSGGMCXSKXSPGQH

SEQ ID NO: 928 - protein, 15 aa, synthetic construct
  REGION 1..15: note = peptide sequence within human TNFR2 that represents epitope that TNFR2 agonist antibodies or fragments thereof can bind to
PSTAPSTSFLLPMGP

SEQ ID NO: 929 - protein, 27 aa, synthetic construct
  REGION 1..27: note = peptide sequence within human TNFR2 that represents epitope that TNFR2 agonist antibodies or fragments thereof can bind to
  VARIANT 23: note = Xaa is Cys residue protected with ACM protecting group
RCSSDQVETQAGGSGGQNRICTXRPGW

SEQ ID NO: 930 - protein, 27 aa, synthetic construct
  REGION 1..27: note = peptide sequence within human TNFR2 that represents epitope that TNFR2 agonist antibodies or fragments thereof can bind to
  VARIANT 3: note = Xaa is Cys residue protected with ACM protecting group
  VARIANT 6: note = Xaa is Cys residue protected with ACM protecting group
  VARIANT 23: note = Xaa is Cys residue protected with ACM protecting group
PEXLSXGSRCSGGSGGQNRICTXRPGW

SEQ ID NO: 931 - protein, 27 aa, synthetic construct
  REGION 1..27: note = peptide sequence within human TNFR2 that represents epitope that TNFR2 agonist antibodies or fragments thereof can bind to
  VARIANT 11: note = Xaa is Cys residue protected with ACM protecting group
  VARIANT 24: note = Xaa is Cys residue protected with ACM protecting group
CSSDQVETQAXGGSGGEQNRICTXRPG

SEQ ID NO: 932 - protein, 27 aa, synthetic construct
  REGION 1..27: note = peptide sequence within human TNFR2 that represents epitope that TNFR2 agonist antibodies or fragments thereof can bind to
  VARIANT 19: note = Xaa is Cys residue protected with ACM protecting group
  VARIANT 22: note = Xaa is Cys residue protected with ACM protecting group
PYAPEPGSTCRGGSGGMCXSKXSPGQH

SEQ ID NO: 933 - protein, 27 aa, synthetic construct
  REGION 1..27: note = peptide sequence within human TNFR2 that represents epitope that TNFR2 agonist antibodies or fragments thereof can bind to
  VARIANT 4: note = Xaa is Cys residue protected with ACM protecting group
  VARIANT 7: note = Xaa is Cys residue protected with ACM protecting group
  VARIANT 18: note = Xaa is Cys residue protected with ACM protecting group
VPEXLSXGSRCGGSGGAXTREQNRICT

SEQ ID NO: 934 - protein, 22 aa, synthetic construct
  REGION 1..22: note = peptide sequence within human TNFR2 that represents epitope that TNFR2 agonist antibodies or fragments thereof can bind to
  VARIANT 11: note = Xaa is Cys residue protected with ACM protecting group
  VARIANT 21: note = Xaa is Cys residue protected with ACM protecting group
CSSDQVETQAXTREQNRICTXR

SEQ ID NO: 935 - protein, 27 aa, synthetic construct
  REGION 1..27: note = peptide sequence within human TNFR2 that represents epitope that TNFR2 agonist antibodies or fragments thereof can bind to
  VARIANT 2: note = Xaa is Cys residue protected with ACM protecting group
  VARIANT 5: note = Xaa is Cys residue protected with ACM protecting group
  VARIANT 19: note = Xaa is Cys residue protected with ACM protecting group
EXLSXGSRCSSGGSGGQAXTREQNRIC

SEQ ID NO: 936 - protein, 27 aa, synthetic construct
  REGION 1..27: note = peptide sequence within human TNFR2 that represents epitope that TNFR2 agonist antibodies or fragments thereof can bind to
  VARIANT 3: note = Xaa is Cys residue protected with ACM protecting group
  VARIANT 23: note = Xaa is Cys residue protected with ACM protecting group
LSXGSRCSSDQGGSGGQNRICTXRPGW

SEQ ID NO: 937 - protein, 27 aa, synthetic construct
  REGION 1..27: note = peptide sequence within human TNFR2 that represents epitope that TNFR2 agonist antibodies or fragments thereof can bind to
  VARIANT 1: note = Xaa is Cys residue protected with ACM protecting group
  VARIANT 18: note = Xaa is Cys residue protected with ACM protecting group
XALSKQEGCRLGGSGGLXAPLRKCRPG

SEQ ID NO: 938 - protein, 27 aa, synthetic construct
  REGION 1..27: note = peptide sequence within human TNFR2 that represents epitope that TNFR2 agonist antibodies or fragments thereof can bind to
  VARIANT 19: note = Xaa is Cys residue protected with ACM protecting group
  VARIANT 22: note = Xaa is Cys residue protected with ACM protecting group
PEPGSTCRLREGGSGGMCXSKXSPGQH

SEQ ID NO: 939 - protein, 22 aa, synthetic construct
  REGION 1..22: note = peptide sequence within human TNFR2 that represents epitope that TNFR2 agonist antibodies or fragments thereof can bind to
  VARIANT 4: note = Xaa is Cys residue protected with ACM protecting group
  VARIANT 20: note = Xaa is Cys residue protected with ACM protecting group
NRIXTCRPGWYCALSKQEGXRL

SEQ ID NO: 940 - protein, 27 aa, synthetic construct
  REGION 1..27: note = peptide sequence within human TNFR2 that represents epitope that TNFR2 agonist antibodies or fragments thereof can bind to
  VARIANT 4: note = Xaa is Cys residue protected with ACM protecting group
  VARIANT 7: note = Xaa is Cys residue protected with ACM protecting group
  VARIANT 24: note = Xaa is Cys residue protected with ACM protecting group
VPEXLSXGSRCGGSGGEQNRICTXRPG

SEQ ID NO: 941 - protein, 27 aa, synthetic construct
  REGION 1..27: note = peptide sequence within human TNFR2 that represents epitope that TNFR2 agonist antibodies or fragments thereof can bind to
  VARIANT 19: note = Xaa is Cys residue protected with ACM protecting group
  VARIANT 22: note = Xaa is Cys residue protected with ACM protecting group
EPGSTCRLREYGGSGGMCXSKXSPGQH

SEQ ID NO: 942 - protein, 27 aa, synthetic construct
  REGION 1..27: note = peptide sequence within human TNFR2 that represents epitope that TNFR2 agonist antibodies or fragments thereof can bind to
KPCAPGTFSNTGGSGGTTSSTDICRPH

SEQ ID NO: 943 - protein, 27 aa, synthetic construct
  REGION 1..27: note = peptide sequence within human TNFR2 that represents epitope that TNFR2 agonist antibodies or fragments thereof can bind to
  VARIANT 24: note = Xaa is Cys residue protected with ACM protecting group
SRCSSDQVETQGGSGGEQNRICTXRPG

SEQ ID NO: 944 - protein, 27 aa, synthetic construct
  REGION 1..27: note = peptide sequence within human TNFR2 that represents epitope that TNFR2 agonist antibodies or fragments thereof can bind to
  VARIANT 7: note = Xaa is Cys residue protected with ACM protecting group
  VARIANT 20: note = Xaa is Cys residue protected with ACM protecting group
CAPLRKXRPGFGGSGGCKPXAPGTFSN

SEQ ID NO: 945 - protein, 27 aa, synthetic construct
  REGION 1..27: note = peptide sequence within human TNFR2 that represents epitope that TNFR2 agonist antibodies or fragments thereof can bind to
  VARIANT 4: note = Xaa is Cys residue protected with ACM protecting group
  VARIANT 11: note = Xaa is Cys residue protected with ACM protecting group
  VARIANT 26: note = Xaa is Cys residue protected with ACM protecting group
VPEXLSCGSRXGGSGGACTREQNRIXT

SEQ ID NO: 946 - protein, 27 aa, synthetic construct
  REGION 1..27: note = peptide sequence within human TNFR2 that represents epitope that TNFR2 agonist antibodies or fragments thereof can bind to
  VARIANT 7: note = Xaa is Cys residue protected with ACM protecting group
WNWVPEXLSCGGGSGGTQACTREQNRI

SEQ ID NO: 947 - protein, 27 aa, synthetic construct
  REGION 1..27: note = peptide sequence within human TNFR2 that represents epitope that TNFR2 agonist antibodies or fragments thereof can bind to
  VARIANT 1: note = Xaa is Cys residue protected with ACM protecting group
  VARIANT 4: note = Xaa is Cys residue protected with ACM protecting group
  VARIANT 19: note = Xaa is Cys residue protected with ACM protecting group
XLSXGSRCSSDGGSGGQAXTREQNRIC

SEQ ID NO: 948 - protein, 27 aa, synthetic construct
  REGION 1..27: note = peptide sequence within human TNFR2 that represents epitope that TNFR2 agonist antibodies or fragments thereof can bind to
  VARIANT 9: note = Xaa is Cys residue protected with ACM protecting group
SKQEGCRLXAPGGSGGCRPGFGVARPG

SEQ ID NO: 949 - protein, 15 aa, synthetic construct
  REGION 1..15: note = peptide sequence within human TNFR2 that represents epitope that TNFR2 agonist antibodies or fragments thereof can bind to
LRKCRPGFGVARPGT

SEQ ID NO: 950 - protein, 27 aa, synthetic construct
  REGION 1..27: note = peptide sequence within human TNFR2 that represents epitope that TNFR2 agonist antibodies or fragments thereof can bind to
  VARIANT 5: note = Xaa is Cys residue protected with ACM protecting group
  VARIANT 25: note = Xaa is Cys residue protected with ACM protecting group
  VARIANT 27: note = Xaa is Cys residue protected with ACM protecting group
WVPEXLSCGSRGGSGGCTREQNRIXTX

SEQ ID NO: 951 - protein, 27 aa, synthetic construct
  REGION 1..27: note = peptide sequence within human TNFR2 that represents epitope that TNFR2 agonist antibodies or fragments thereof can bind to
  VARIANT 3: note = Xaa is Cys residue protected with ACM protecting group
  VARIANT 18: note = Xaa is Cys residue protected with ACM protecting group
WYXALSKQEGCGGSGGLXAPLRKCRPG

SEQ ID NO: 952 - protein, 33 aa, synthetic construct
  REGION 1..33: note = peptide sequence within human TNFR2 that represents epitope that TNFR2 agonist antibodies or fragments thereof can bind to
  VARIANT 3: note = Xaa is Cys residue protected with ACM protecting group
  VARIANT 6: note = Xaa is Cys residue protected with ACM protecting group
  VARIANT 12: note = Xaa is Cys residue protected with ACM protecting group
  VARIANT 25: note = Xaa is Cys residue protected with ACM protecting group
CGXRLXAPLRKXRPGFCNASMDAVXTSTSPTRC

SEQ ID NO: 953 - protein, 33 aa, synthetic construct
  REGION 1..33: note = peptide sequence within human TNFR2 that represents epitope that TNFR2 agonist antibodies or fragments thereof can bind to
  VARIANT 4: note = Xaa is Cys residue protected with ACM protecting group
  VARIANT 23: note = Xaa is Cys residue protected with ACM protecting group
CQIXNVVAIPGNASMDCAPLRKXRPGFGVARPC

SEQ ID NO: 954 - protein, 15 aa, synthetic construct
  REGION 1..15: note = peptide sequence within human TNFR2 that represents epitope that TNFR2 agonist antibodies or fragments thereof can bind to
VETQACTREQNRICT

SEQ ID NO: 955 - protein, 27 aa, synthetic construct
  REGION 1..27: note = peptide sequence within human TNFR2 that represents epitope that TNFR2 agonist antibodies or fragments thereof can bind to
  VARIANT 6: note = Xaa is Cys residue protected with ACM protecting group
  VARIANT 26: note = Xaa is Cys residue protected with ACM protecting group
NWVPEXLSCGSGGSGGACTREQNRIXT

SEQ ID NO: 956 - protein, 27 aa, synthetic construct
  REGION 1..27: note = peptide sequence within human TNFR2 that represents epitope that TNFR2 agonist antibodies or fragments thereof can bind to
  VARIANT 19: note = Xaa is Cys residue protected with ACM protecting group
  VARIANT 22: note = Xaa is Cys residue protected with ACM protecting group
TCRLREYYDQTGGSGGMCXSKXSPGQH

SEQ ID NO: 957 - protein, 27 aa, synthetic construct
  REGION 1..27: note = peptide sequence within human TNFR2 that represents epitope that TNFR2 agonist antibodies or fragments thereof can bind to
  VARIANT 3: note = Xaa is Cys residue protected with ACM protecting group
  VARIANT 6: note = Xaa is Cys residue protected with ACM protecting group
  VARIANT 24: note = Xaa is Cys residue protected with ACM protecting group
PEXLSXGSRCSGGSGGEQNRICTXRPG

SEQ ID NO: 958 - protein, 27 aa, synthetic construct
  REGION 1..27: note = peptide sequence within human TNFR2 that represents epitope that TNFR2 agonist antibodies or fragments thereof can bind to
  VARIANT 23: note = Xaa is Cys residue protected with ACM protecting group
GSRCSSDQVETGGSGGQNRICTXRPGW

SEQ ID NO: 959 - protein, 27 aa, synthetic construct
  REGION 1..27: note = peptide sequence within human TNFR2 that represents epitope that TNFR2 agonist antibodies or fragments thereof can bind to
  VARIANT 3: note = Xaa is Cys residue protected with ACM protecting group
  VARIANT 10: note = Xaa is Cys residue protected with ACM protecting group
  VARIANT 26: note = Xaa is Cys residue protected with ACM protecting group
PEXLSCGSRXSGGSGGACTREQNRIXT

SEQ ID NO: 960 - protein, 27 aa, synthetic construct
  REGION 1..27: note = peptide sequence within human TNFR2 that represents epitope that TNFR2 agonist antibodies or fragments thereof can bind to
  VARIANT 7: note = Xaa is Cys residue protected with ACM protecting group
  VARIANT 27: note = Xaa is Cys residue protected with ACM protecting group
LSCGSRXSSDQGGSGGQACTREQNRIX

SEQ ID NO: 961 - protein, 27 aa, synthetic construct
  REGION 1..27: note = peptide sequence within human TNFR2 that represents epitope that TNFR2 agonist antibodies or fragments thereof can bind to
PCAPGTFSNTTGGSGGTTSSTDICRPH

SEQ ID NO: 962 - protein, 33 aa, synthetic construct
  REGION 1..33: note = peptide sequence within human TNFR2 that represents epitope that TNFR2 agonist antibodies or fragments thereof can bind to
  VARIANT 4: note = Xaa is Cys residue protected with ACM protecting group
  VARIANT 12: note = Xaa is Cys residue protected with ACM protecting group
  VARIANT 14: note = Xaa is Cys residue protected with ACM protecting group
  VARIANT 25: note = Xaa is Cys residue protected with ACM protecting group
CQAXTREQNRIXTXRPCNASMDAVXTSTSPTRC

SEQ ID NO: 963 - protein, 27 aa, synthetic construct
  REGION 1..27: note = peptide sequence within human TNFR2 that represents epitope that TNFR2 agonist antibodies or fragments thereof can bind to
  VARIANT 23: note = Xaa is Cys residue protected with ACM protecting group
SRCSSDQVETQGGSGGQNRICTXRPGW

SEQ ID NO: 964 - protein, 17 aa, synthetic construct
  REGION 1..17: note = peptide sequence within human TNFR2 that represents epitope that TNFR2 agonist antibodies or fragments thereof can bind to
CQAATREQNRIGAARPC

SEQ ID NO: 965 - protein, 27 aa, synthetic construct
  REGION 1..27: note = peptide sequence within human TNFR2 that represents epitope that TNFR2 agonist antibodies or fragments thereof can bind to
  VARIANT 11: note = Xaa is Cys residue protected with ACM protecting group
  VARIANT 23: note = Xaa is Cys residue protected with ACM protecting group
CSSDQVETQAXGGSGGQNRICTXRPGW

SEQ ID NO: 966 - protein, 33 aa, synthetic construct
  REGION 1..33: note = peptide sequence within human TNFR2 that represents epitope that TNFR2 agonist antibodies or fragments thereof can bind to
  VARIANT 14: note = Xaa is Cys residue protected with ACM protecting group
  VARIANT 25: note = Xaa is Cys residue protected with ACM protecting group
CAFTPYAPEPGSTXRLCNASMDAVXTSTSPTRC

SEQ ID NO: 967 - protein, 27 aa, synthetic construct
  REGION 1..27: note = peptide sequence within human TNFR2 that represents epitope that TNFR2 agonist antibodies or fragments thereof can bind to
  VARIANT 19: note = Xaa is Cys residue protected with ACM protecting group
  VARIANT 22: note = Xaa is Cys residue protected with ACM protecting group
CRLREYYDQTAGGSGGMCXSKXSPGQH

SEQ ID NO: 968 - protein, 15 aa, synthetic construct
  REGION 1..15: note = peptide sequence within human TNFR2 that represents epitope that TNFR2 agonist antibodies or fragments thereof can bind to
EGCRLCAPLRKCRPG

SEQ ID NO: 969 - protein, 15 aa, synthetic construct
  REGION 1..15: note = peptide sequence within human TNFR2 that represents epitope that TNFR2 agonist antibodies or fragments thereof can bind to
AFTPYAPEPGAACRL

SEQ ID NO: 970 - protein, 33 aa, synthetic construct
  REGION 1..33: note = peptide sequence within human TNFR2 that represents epitope that TNFR2 agonist antibodies or fragments thereof can bind to
  VARIANT 2: note = Xaa is Cys residue protected with ACM protecting group
  VARIANT 23: note = Xaa is Cys residue protected with ACM protecting group
  VARIANT 24: note = Xaa is Cys residue protected with ACM protecting group
  VARIANT 27: note = Xaa is Cys residue protected with ACM protecting group
CXEDSTYTQLWNWVPECQTAQMXXSKXSPGQHC

SEQ ID NO: 971 - protein, 27 aa, synthetic construct
  REGION 1..27: note = peptide sequence within human TNFR2 that represents epitope that TNFR2 agonist antibodies or fragments thereof can bind to
  VARIANT 2: note = Xaa is Cys residue protected with ACM protecting group
  VARIANT 9: note = Xaa is Cys residue protected with ACM protecting group
  VARIANT 27: note = Xaa is Cys residue protected with ACM protecting group
EXLSCGSRXSSGGSGGQACTREQNRIX

SEQ ID NO: 972 - protein, 27 aa, synthetic construct
  REGION 1..27: note = peptide sequence within human TNFR2 that represents epitope that TNFR2 agonist antibodies or fragments thereof can bind to
  VARIANT 3: note = Xaa is Cys residue protected with ACM protecting group
  VARIANT 6: note = Xaa is Cys residue protected with ACM protecting group
  VARIANT 17: note = Xaa is Cys residue protected with ACM protecting group
  VARIANT 27: note = Xaa is Cys residue protected with ACM protecting group
PEXLSXGSRCSGGSGGXTREQNRICTX

SEQ ID NO: 973 - protein, 27 aa, synthetic construct
  REGION 1..27: note = peptide sequence within human TNFR2 that represents epitope that TNFR2 agonist antibodies or fragments thereof can bind to
  VARIANT 8: note = Xaa is Cys residue protected with ACM protecting group
  VARIANT 20: note = Xaa is Cys residue protected with ACM protecting group
LCAPLRKXRPGGGSGGCKPXAPGTFSN

SEQ ID NO: 974 - protein, 27 aa, synthetic construct
  REGION 1..27: note = peptide sequence within human TNFR2 that represents epitope that TNFR2 agonist antibodies or fragments thereof can bind to
  VARIANT 8: note = Xaa is Cys residue protected with ACM protecting group
LWNWVPEXLSCGGSGGETQACTREQNR

SEQ ID NO: 975 - protein, 27 aa, synthetic construct
  REGION 1..27: note = peptide sequence within human TNFR2 that represents epitope that TNFR2 agonist antibodies or fragments thereof can bind to
  VARIANT 6: note = Xaa is Cys residue protected with ACM protecting group
  VARIANT 27: note = Xaa is Cys residue protected with ACM protecting group
NWVPEXLSCGSGGSGGQACTREQNRIX

SEQ ID NO: 976 - protein, 27 aa, synthetic construct
  REGION 1..27: note = peptide sequence within human TNFR2 that represents epitope that TNFR2 agonist antibodies or fragments thereof can bind to
  VARIANT 24: note = Xaa is Cys residue protected with ACM protecting group
RCSSDQVETQAGGSGGEQNRICTXRPG

SEQ ID NO: 977 - protein, 27 aa, synthetic construct
  REGION 1..27: note = peptide sequence within human TNFR2 that represents epitope that TNFR2 agonist antibodies or fragments thereof can bind to
  VARIANT 2: note = Xaa is Cys residue protected with ACM protecting group
YXALSKQEGCRGGSGGCRPGFGVARPG

SEQ ID NO: 978 - protein, 27 aa, synthetic construct
  REGION 1..27: note = peptide sequence within human TNFR2 that represents epitope that TNFR2 agonist antibodies or fragments thereof can bind to
  VARIANT 10: note = Xaa is Cys residue protected with ACM protecting group
  VARIANT 18: note = Xaa is Cys residue protected with ACM protecting group
LSKQEGCRLXAGGSGGLXAPLRKCRPG

SEQ ID NO: 979 - protein, 27 aa, synthetic construct
  REGION 1..27: note = peptide sequence within human TNFR2 that represents epitope that TNFR2 agonist antibodies or fragments thereof can bind to
  VARIANT 3: note = Xaa is Cys residue protected with ACM protecting group
WYXALSKQEGCGGSGGKCRPGFGVARP

SEQ ID NO: 980 - protein, 33 aa, synthetic construct
  REGION 1..33: note = peptide sequence within human TNFR2 that represents epitope that TNFR2 agonist antibodies or fragments thereof can bind to
  VARIANT 3: note = Xaa is Cys residue protected with ACM protecting group
  VARIANT 6: note = Xaa is Cys residue protected with ACM protecting group
  VARIANT 12: note = Xaa is Cys residue protected with ACM protecting group
  VARIANT 30: note = Xaa is Cys residue protected with ACM protecting group
CGXRLXAPLRKXRPGFCAFTPYAPEPGSTXRLC

SEQ ID NO: 981 - protein, 27 aa, synthetic construct
  REGION 1..27: note = peptide sequence within human TNFR2 that represents epitope that TNFR2 agonist antibodies or fragments thereof can bind to
  VARIANT 1: note = Xaa is Cys residue protected with ACM protecting group
  VARIANT 8: note = Xaa is Cys residue protected with ACM protecting group
  VARIANT 27: note = Xaa is Cys residue protected with ACM protecting group
XLSCGSRXSSDGGSGGQACTREQNRIX

SEQ ID NO: 982 - protein, 33 aa, synthetic construct
  REGION 1..33: note = peptide sequence within human TNFR2 that represents epitope that TNFR2 agonist antibodies or fragments thereof can bind to
  VARIANT 9: note = Xaa is Cys residue protected with ACM protecting group
  VARIANT 25: note = Xaa is Cys residue protected with ACM protecting group
CDQVETQAXTREQNRICNASMDAVXTSTSPTRC

SEQ ID NO: 983 - protein, 27 aa, synthetic construct
  REGION 1..27: note = peptide sequence within human TNFR2 that represents epitope that TNFR2 agonist antibodies or fragments thereof can bind to
  VARIANT 11: note = Xaa is Cys residue protected with ACM protecting group
  VARIANT 18: note = Xaa is Cys residue protected with ACM protecting group
ALSKQEGCRLXGGSGGLXAPLRKCRPG

SEQ ID NO: 984 - protein, 27 aa, synthetic construct
  REGION 1..27: note = peptide sequence within human TNFR2 that represents epitope that TNFR2 agonist antibodies or fragments thereof can bind to
  VARIANT 7: note = Xaa is Cys residue protected with ACM protecting group
  VARIANT 25: note = Xaa is Cys residue protected with ACM protecting group
  VARIANT 27: note = Xaa is Cys residue protected with ACM protecting group
WNWVPEXLSCGGGSGGCTREQNRIXTX

SEQ ID NO: 985 - protein, 27 aa, synthetic construct
  REGION 1..27: note = peptide sequence within human TNFR2 that represents epitope that TNFR2 agonist antibodies or fragments thereof can bind to
  VARIANT 7: note = Xaa is Cys residue protected with ACM protecting group
  VARIANT 20: note = Xaa is Cys residue protected with ACM protecting group
LSKQEGXRLCAGGSGGCKPXAPGTFSN

SEQ ID NO: 986 - protein, 15 aa, synthetic construct
  REGION 1..15: note = peptide sequence within human TNFR2 that represents epitope that TNFR2 agonist antibodies or fragments thereof can bind to
CTREQNRICTAAPGW

SEQ ID NO: 987 - protein, 27 aa, synthetic construct
  REGION 1..27: note = peptide sequence within human TNFR2 that represents epitope that TNFR2 agonist antibodies or fragments thereof can bind to
  VARIANT 2: note = Xaa is Cys residue protected with ACM protecting group
  VARIANT 18: note = Xaa is Cys residue protected with ACM protecting group
YXALSKQEGCRGGSGGLXAPLRKCRPG

SEQ ID NO: 988 - protein, 27 aa, synthetic construct
  REGION 1..27: note = peptide sequence within human TNFR2 that represents epitope that TNFR2 agonist antibodies or fragments thereof can bind to
  VARIANT 1: note = Xaa is Cys residue protected with ACM protecting group
  VARIANT 10: note = Xaa is Cys residue protected with ACM protecting group
  VARIANT 20: note = Xaa is Cys residue protected with ACM protecting group
XRLCAPLRKXRGGSGGCKPXAPGTFSN

SEQ ID NO: 989 - protein, 15 aa, synthetic construct
  REGION 1..15: note = peptide sequence within human TNFR2 that represents epitope that TNFR2 agonist antibodies or fragments thereof can bind to
QNRICTCRPGAACAL

SEQ ID NO: 990 - protein, 33 aa, synthetic construct
  REGION 1..33: note = peptide sequence within human TNFR2 that represents epitope that TNFR2 agonist antibodies or fragments thereof can bind to
  VARIANT 3: note = Xaa is Cys residue protected with ACM protecting group
  VARIANT 6: note = Xaa is Cys residue protected with ACM protecting group
  VARIANT 12: note = Xaa is Cys residue protected with ACM protecting group
  VARIANT 20: note = Xaa is Cys residue protected with ACM protecting group
  VARIANT 28: note = Xaa is Cys residue protected with ACM protecting group
  VARIANT 30: note = Xaa is Cys residue protected with ACM protecting group
CGXRLXAPLRKXRPGFCQAXTREQNRIXTXRPC

SEQ ID NO: 991 - protein, 27 aa, synthetic construct
  REGION 1..27: note = peptide sequence within human TNFR2 that represents epitope that TNFR2 agonist antibodies or fragments thereof can bind to
  VARIANT 4: note = Xaa is Cys residue protected with ACM protecting group
DVVXKPCAPGTGGSGGTTSSTDICRPH

SEQ ID NO: 992 - protein, 27 aa, synthetic construct
  REGION 1..27: note = peptide sequence within human TNFR2 that represents epitope that TNFR2 agonist antibodies or fragments thereof can bind to
  VARIANT 5: note = Xaa is Cys residue protected with ACM protecting group
  VARIANT 26: note = Xaa is Cys residue protected with ACM protecting group
QNRIXTCRPGWGGSGGYCALSKQEGXR

SEQ ID NO: 993 - protein, 15 aa, synthetic construct
  REGION 1..15: note = peptide sequence within human TNFR2 that represents epitope that TNFR2 agonist antibodies or fragments thereof can bind to
PSTSFLLPMGAAPPA

SEQ ID NO: 994 - protein, 22 aa, synthetic construct
  REGION 1..22: note = peptide sequence within human TNFR2 that represents epitope that TNFR2 agonist antibodies or fragments thereof can bind to
  VARIANT 6: note = Xaa is Cys residue protected with ACM protecting group
EGCRLXAPLRKCRPGFGVARPG

SEQ ID NO: 995 - protein, 27 aa, synthetic construct
  REGION 1..27: note = peptide sequence within human TNFR2 that represents epitope that TNFR2 agonist antibodies or fragments thereof can bind to
  VARIANT 2: note = Xaa is Cys residue protected with ACM protecting group
  VARIANT 5: note = Xaa is Cys residue protected with ACM protecting group
  VARIANT 18: note = Xaa is Cys residue protected with ACM protecting group
EXLSXGSRCSSGGSGGAXTREQNRICT

SEQ ID NO: 996 - protein, 27 aa, synthetic construct
  REGION 1..27: note = peptide sequence within human TNFR2 that represents epitope that TNFR2 agonist antibodies or fragments thereof can bind to
  VARIANT 2: note = Xaa is Cys residue protected with ACM protecting group
  VARIANT 5: note = Xaa is Cys residue protected with ACM protecting group
  VARIANT 23: note = Xaa is Cys residue protected with ACM protecting group
EXLSXGSRCSSGGSGGQNRICTXRPGW

SEQ ID NO: 997 - protein, 27 aa, synthetic construct
  REGION 1..27: note = peptide sequence within human TNFR2 that represents epitope that TNFR2 agonist antibodies or fragments thereof can bind to
  VARIANT 3: note = Xaa is Cys residue protected with ACM protecting group
  VARIANT 19: note = Xaa is Cys residue protected with ACM protecting group
LSXGSRCSSDQGGSGGQAXTREQNRIC

SEQ ID NO: 998 - protein, 27 aa, synthetic construct
  REGION 1..27: note = peptide sequence within human TNFR2 that represents epitope that TNFR2 agonist antibodies or fragments thereof can bind to
  VARIANT 19: note = Xaa is Cys residue protected with ACM protecting group
  VARIANT 22: note = Xaa is Cys residue protected with ACM protecting group
GSTCRLREYYDGGSGGMCXSKXSPGQH

SEQ ID NO: 999 - protein, 15 aa, synthetic construct
  REGION 1..15: note = peptide sequence within human TNFR2 that represents epitope that TNFR2 agonist antibodies or fragments thereof can bind to
APSTSFLLPMGPSPP

SEQ ID NO: 1000 - protein, 27 aa, synthetic construct
  REGION 1..27: note = peptide sequence within human TNFR2 that represents epitope that TNFR2 agonist antibodies or fragments thereof can bind to
  VARIANT 6: note = Xaa is Cys residue protected with ACM protecting group
NWVPEXLSCGSGGSGGTQACTREQNRI

SEQ ID NO: 1001 - protein, 27 aa, synthetic construct
  REGION 1..27: note = peptide sequence within human TNFR2 that represents epitope that TNFR2 agonist antibodies or fragments thereof can bind to
  VARIANT 4: note = Xaa is Cys residue protected with ACM protecting group
  VARIANT 26: note = Xaa is Cys residue protected with ACM protecting group
NRIXTCRPGWYGGSGGYCALSKQEGXR

SEQ ID NO: 1002 - protein, 27 aa, synthetic construct
  REGION 1..27: note = peptide sequence within human TNFR2 that represents epitope that TNFR2 agonist antibodies or fragments thereof can bind to
KPCAPGTFSNTGGSGGTSSTDICRPHQ

SEQ ID NO: 1003 - protein, 33 aa, synthetic construct
  REGION 1..33: note = peptide sequence within human TNFR2 that represents epitope that TNFR2 agonist antibodies or fragments thereof can bind to
  VARIANT 7: note = Xaa is Cys residue protected with ACM protecting group
  VARIANT 30: note = Xaa is Cys residue protected with ACM protecting group
CAPLRKXRPGFGVARPCAFTPYAPEPGSTXRLC

SEQ ID NO: 1004 - protein, 27 aa, synthetic construct
  REGION 1..27: note = peptide sequence within human TNFR2 that represents epitope that TNFR2 agonist antibodies or fragments thereof can bind to
  VARIANT 19: note = Xaa is Cys residue protected with ACM protecting group
  VARIANT 22: note = Xaa is Cys residue protected with ACM protecting group
TPYAPEPGSTCGGSGGMCXSKXSPGQH

SEQ ID NO: 1005 - protein, 27 aa, synthetic construct
  REGION 1..27: note = peptide sequence within human TNFR2 that represents epitope that TNFR2 agonist antibodies or fragments thereof can bind to
  VARIANT 7: note = Xaa is Cys residue protected with ACM protecting group
  VARIANT 25: note = Xaa is Cys residue protected with ACM protecting group
  VARIANT 27: note = Xaa is Cys residue protected with ACM protecting group
LSCGSRXSSDQGGSGGCTREQNRIXTX

SEQ ID NO: 1006 - protein, 15 aa, synthetic construct
  REGION 1..15: note = peptide sequence within human TNFR2 that represents epitope that TNFR2 agonist antibodies or fragments thereof can bind to
TAPSTSFLLPMGPSP

SEQ ID NO: 1007 - protein, 27 aa, synthetic construct
  REGION 1..27: note = peptide sequence within human TNFR2 that represents epitope that TNFR2 agonist antibodies or fragments thereof can bind to
  VARIANT 2: note = Xaa is Cys residue protected with ACM protecting group
  VARIANT 9: note = Xaa is Cys residue protected with ACM protecting group
  VARIANT 26: note = Xaa is Cys residue protected with ACM protecting group
EXLSCGSRXSSGGSGGACTREQNRIXT

SEQ ID NO: 1008 - protein, 27 aa, synthetic construct
  REGION 1..27: note = peptide sequence within human TNFR2 that represents epitope that TNFR2 agonist antibodies or fragments thereof can bind to
  VARIANT 11: note = Xaa is Cys residue protected with ACM protecting group
  VARIANT 26: note = Xaa is Cys residue protected with ACM protecting group
CSSDQVETQAXGGSGGTREQNRICTXR

SEQ ID NO: 1009 - protein, 27 aa, synthetic construct
  REGION 1..27: note = peptide sequence within human TNFR2 that represents epitope that TNFR2 agonist antibodies or fragments thereof can bind to
  VARIANT 3: note = Xaa is Cys residue protected with ACM protecting group
  VARIANT 6: note = Xaa is Cys residue protected with ACM protecting group
  VARIANT 19: note = Xaa is Cys residue protected with ACM protecting group
PEXLSXGSRCSGGSGGQAXTREQNRIC

SEQ ID NO: 1010 - protein, 27 aa, synthetic construct
  REGION 1..27: note = peptide sequence within human TNFR2 that represents epitope that TNFR2 agonist antibodies or fragments thereof can bind to
  VARIANT 1: note = Xaa is Cys residue protected with ACM protecting group
  VARIANT 23: note = Xaa is Cys residue protected with ACM protecting group
XGSRCSSDQVEGGSGGQNRICTXRPGW

SEQ ID NO: 1011 - protein, 27 aa, synthetic construct
  REGION 1..27: note = peptide sequence within human TNFR2 that represents epitope that TNFR2 agonist antibodies or fragments thereof can bind to
  VARIANT 9: note = Xaa is Cys residue protected with ACM protecting group
  VARIANT 18: note = Xaa is Cys residue protected with ACM protecting group
SKQEGCRLXAPGGSGGLXAPLRKCRPG

SEQ ID NO: 1012 - protein, 27 aa, synthetic construct
  REGION 1..27: note = peptide sequence within human TNFR2 that represents epitope that TNFR2 agonist antibodies or fragments thereof can bind to
CAPGTFSNTTSGGSGGTTSSTDICRPH

SEQ ID NO: 1013 - protein, 27 aa, synthetic construct
  REGION 1..27: note = peptide sequence within human TNFR2 that represents epitope that TNFR2 agonist antibodies or fragments thereof can bind to
  VARIANT 1: note = Xaa is Cys residue protected with ACM protecting group
  VARIANT 26: note = Xaa is Cys residue protected with ACM protecting group
XGSRCSSDQVEGGSGGTREQNRICTXR

SEQ ID NO: 1014 - protein, 33 aa, synthetic construct
  REGION 1..33: note = peptide sequence within human TNFR2 that represents epitope that TNFR2 agonist antibodies or fragments thereof can bind to
  VARIANT 7: note = Xaa is Cys residue protected with ACM protecting group
  VARIANT 23: note = Xaa is Cys residue protected with ACM protecting group
CAPLRKXRPGFGVARPCAPLRKXRPGFGVARPC

SEQ ID NO: 1015 - protein, 27 aa, synthetic construct
  REGION 1..27: note = peptide sequence within human TNFR2 that represents epitope that TNFR2 agonist antibodies or fragments thereof can bind to
  VARIANT 4: note = Xaa is Cys residue protected with ACM protecting group
  VARIANT 7: note = Xaa is Cys residue protected with ACM protecting group
  VARIANT 23: note = Xaa is Cys residue protected with ACM protecting group
VPEXLSXGSRCGGSGGQNRICTXRPGW

SEQ ID NO: 1016 - protein, 27 aa, synthetic construct
  REGION 1..27: note = peptide sequence within human TNFR2 that represents epitope that TNFR2 agonist antibodies or fragments thereof can bind to
  VARIANT 2: note = Xaa is Cys residue protected with ACM protecting group
VXKPCAPGTFSGGSGGTTSSTDICRPH

SEQ ID NO: 1017 - protein, 27 aa, synthetic construct
  REGION 1..27: note = peptide sequence within human TNFR2 that represents epitope that TNFR2 agonist antibodies or fragments thereof can bind to
  VARIANT 7: note = Xaa is Cys residue protected with ACM protecting group
WNWVPEXLSCGGGSGGETQACTREQNR

SEQ ID NO: 1018 - protein, 15 aa, synthetic construct
  REGION 1..15: note = peptide sequence within human TNFR2 that represents epitope that TNFR2 agonist antibodies or fragments thereof can bind to
DQVETQACTREQNRI

SEQ ID NO: 1019 - protein, 33 aa, synthetic construct
  REGION 1..33: note = peptide sequence within human TNFR2 that represents epitope that TNFR2 agonist antibodies or fragments thereof can bind to
  VARIANT 7: note = Xaa is Cys residue protected with ACM protecting group
  VARIANT 20: note = Xaa is Cys residue protected with ACM protecting group
  VARIANT 28: note = Xaa is Cys residue protected with ACM protecting group
  VARIANT 30: note = Xaa is Cys residue protected with ACM protecting group
CAPLRKXRPGFGVARPCQAXTREQNRIXTXRPC

SEQ ID NO: 1020 - protein, 15 aa, synthetic construct
  REGION 1..15: note = peptide sequence within human TNFR2 that represents epitope that TNFR2 agonist antibodies or fragments thereof can bind to
NWVPECLSCGSRCSS

SEQ ID NO: 1021 - protein, 27 aa, synthetic construct
  REGION 1..27: note = peptide sequence within human TNFR2 that represents epitope that TNFR2 agonist antibodies or fragments thereof can bind to
  VARIANT 3: note = Xaa is Cys residue protected with ACM protecting group
  VARIANT 26: note = Xaa is Cys residue protected with ACM protecting group
LSXGSRCSSDQGGSGGTREQNRICTXR

SEQ ID NO: 1022 - protein, 33 aa, synthetic construct; identical to SEQ ID NO: 990
  REGION 1..33: note = peptide sequence within human TNFR2 that represents epitope that TNFR2 agonist antibodies or fragments thereof can bind to
  VARIANT 3: note = Xaa is Cys residue protected with ACM protecting group
  VARIANT 6: note = Xaa is Cys residue protected with ACM protecting group
  VARIANT 12: note = Xaa is Cys residue protected with ACM protecting group
  VARIANT 20: note = Xaa is Cys residue protected with ACM protecting group
  VARIANT 28: note = Xaa is Cys residue protected with ACM protecting group
  VARIANT 30: note = Xaa is Cys residue protected with ACM protecting group

SEQ ID NO: 1023 - protein, 15 aa, synthetic construct
  REGION 1..15: note = peptide sequence within human TNFR2 that represents epitope that TNFR2 agonist antibodies or fragments thereof can bind to
SNTTSSTDICRPHQI

SEQ ID NO: 1024 - protein, 15 aa, synthetic construct
  REGION 1..15: note = peptide sequence within human TNFR2 that represents epitope that TNFR2 agonist antibodies or fragments thereof can bind to
EGCRLCAPLRAARPG

SEQ ID NO: 1025 - protein, 33 aa, synthetic construct
  REGION 1..33: note = peptide sequence within human TNFR2 that represents epitope that TNFR2 agonist antibodies or fragments thereof can bind to
  VARIANT 9: note = Xaa is Cys residue protected with ACM protecting group
  VARIANT 25: note = Xaa is Cys residue protected with ACM protecting group
CAPEPGSTXRLREYYDCNASMDAVXTSTSPTRC

SEQ ID NO: 1026 - protein, 27 aa, synthetic construct
  REGION 1..27: note = peptide sequence within human TNFR2 that represents epitope that TNFR2 agonist antibodies or fragments thereof can bind to
  VARIANT 7: note = Xaa is Cys residue protected with ACM protecting group
  VARIANT 26: note = Xaa is Cys residue protected with ACM protecting group
REQNRIXTCRPGGSGGYCALSKQEGXR

SEQ ID NO: 1027 - protein, 33 aa, synthetic construct
  REGION 1..33: note = peptide sequence within human TNFR2 that represents epitope that TNFR2 agonist antibodies or fragments thereof can bind to
  VARIANT 4: note = Xaa is Cys residue protected with ACM protecting group
  VARIANT 14: note = Xaa is Cys residue protected with ACM protecting group
  VARIANT 23: note = Xaa is Cys residue protected with ACM protecting group
CSRXSSDQVETQAXTRCAPLRKXRPGFGVARPC

SEQ ID NO: 1028 - protein, 27 aa, synthetic construct
  REGION 1..27: note = peptide sequence within human TNFR2 that represents epitope that TNFR2 agonist antibodies or fragments thereof can bind to
  VARIANT 3: note = Xaa is Cys residue protected with ACM protecting group
VVXKPCAPGTFGGSGGTSSTDICRPHQ

SEQ ID NO: 1029 - protein, 22 aa, synthetic construct
  REGION 1..22: note = peptide sequence within human TNFR2 that represents epitope that TNFR2 agonist antibodies or fragments thereof can bind to
  VARIANT 1: note = Xaa is Cys residue protected with ACM protecting group
XKPCAPGTFSNTTSSTDICRPH

SEQ ID NO: 1030 - protein, 27 aa, synthetic construct
  REGION 1..27: note = peptide sequence within human TNFR2 that represents epitope that TNFR2 agonist antibodies or fragments thereof can bind to
  VARIANT 8: note = Xaa is Cys residue protected with ACM protecting group
TETSDVVXKPCGGSGGTTSSTDICRPH

SEQ ID NO: 1031 - protein, 27 aa, synthetic construct
  REGION 1..27: note = peptide sequence within human TNFR2 that represents epitope that TNFR2 agonist antibodies or fragments thereof can bind to
  VARIANT 19: note = Xaa is Cys residue protected with ACM protecting group
RCSSDQVETQAGGSGGQAXTREQNRIC

SEQ ID NO: 1032 - protein, 27 aa, synthetic construct
  REGION 1..27: note = peptide sequence within human TNFR2 that represents epitope that TNFR2 agonist antibodies or fragments thereof can bind to
  VARIANT 11: note = Xaa is Cys residue protected with ACM protecting group
  VARIANT 19: note = Xaa is Cys residue protected with ACM protecting group
CSSDQVETQAXGGSGGQAXTREQNRIC

SEQ ID NO: 1033 - protein, 27 aa, synthetic construct
  REGION 1..27: note = peptide sequence within human TNFR2 that represents epitope that TNFR2 agonist antibodies or fragments thereof can bind to
  VARIANT 4: note = Xaa is Cys residue protected with ACM protecting group
  VARIANT 7: note = Xaa is Cys residue protected with ACM protecting group
  VARIANT 17: note = Xaa is Cys residue protected with ACM protecting group
  VARIANT 27: note = Xaa is Cys residue protected with ACM protecting group
VPEXLSXGSRCGGSGGXTREQNRICTX

SEQ ID NO: 1034 - protein, 27 aa, synthetic construct
  REGION 1..27: note = peptide sequence within human TNFR2 that represents epitope that TNFR2 agonist antibodies or fragments thereof can bind to
  VARIANT 8: note = Xaa is Cys residue protected with ACM protecting group
  VARIANT 25: note = Xaa is Cys residue protected with ACM protecting group
TREQNRIXTCRGGSGGCALSKQEGXRL

SEQ ID NO: 1035 - protein, 27 aa, synthetic construct
  REGION 1..27: note = peptide sequence within human TNFR2 that represents epitope that TNFR2 agonist antibodies or fragments thereof can bind to
  VARIANT 8: note = Xaa is Cys residue protected with ACM protecting group
  VARIANT 26: note = Xaa is Cys residue protected with ACM protecting group
TREQNRIXTCRGGSGGYCALSKQEGXR

SEQ ID NO: 1036 - protein, 15 aa, synthetic construct
  REGION 1..15: note = peptide sequence within human TNFR2 that represents epitope that TNFR2 agonist antibodies or fragments thereof can bind to
VCTSTSPTRSAGPGA

SEQ ID NO: 1037 - protein, 33 aa, synthetic construct
  REGION 1..33: note = peptide sequence within human TNFR2 that represents epitope that TNFR2 agonist antibodies or fragments thereof can bind to
  VARIANT 4: note = Xaa is Cys residue protected with ACM protecting group
  VARIANT 12: note = Xaa is Cys residue protected with ACM protecting group
  VARIANT 14: note = Xaa is Cys residue protected with ACM protecting group
  VARIANT 23: note = Xaa is Cys residue protected with ACM protecting group
CQAXTREQNRIXTXRPCAPLRKXRPGFGVARPC

SEQ ID NO: 1038 - protein, 27 aa, synthetic construct
  REGION 1..27: note = peptide sequence within human TNFR2 that represents epitope that TNFR2 agonist antibodies or fragments thereof can bind to
  VARIANT 5: note = Xaa is Cys residue protected with ACM protecting group
SDVVXKPCAPGGGSGGTTSSTDICRPH

SEQ ID NO: 1039 - protein, 17 aa, synthetic construct
  REGION 1..17: note = peptide sequence within human TNFR2 that represents epitope that TNFR2 agonist antibodies or fragments thereof can bind to
CAATREQNRIAAGRPGC

SEQ ID NO: 1040 - protein, 33 aa, synthetic construct
  REGION 1..33: note = peptide sequence within human TNFR2 that represents epitope that TNFR2 agonist antibodies or fragments thereof can bind to
  VARIANT 9: note = Xaa is Cys residue protected with ACM protecting group
  VARIANT 23: note = Xaa can be any naturally occurring amino acid
CDQVETQAXTREQNRICAPLRKXRPGFGVARPC

SEQ ID NO: 1041 - protein, 27 aa, synthetic construct
  REGION 1..27: note = peptide sequence within human TNFR2 that represents epitope that TNFR2 agonist antibodies or fragments thereof can bind to
  VARIANT 26: note = Xaa is Cys residue protected with ACM protecting group
SRCSSDQVETQGGSGGTREQNRICTXR

SEQ ID NO: 1042 - protein, 15 aa, synthetic construct
  REGION 1..15: note = peptide sequence within human TNFR2 that represents epitope that TNFR2 agonist antibodies or fragments thereof can bind to
STAPSTSFLLPMGPS

SEQ ID NO: 1043 - protein, 27 aa, synthetic construct
  REGION 1..27: note = peptide sequence within human TNFR2 that represents epitope that TNFR2 agonist antibodies or fragments thereof can bind to
  VARIANT 3: note = Xaa is Cys residue protected with ACM protecting group
  VARIANT 18: note = Xaa is Cys residue protected with ACM protecting group
LSXGSRCSSDQGGSGGAXTREQNRICT

SEQ ID NO: 1044 - protein, 33 aa, synthetic construct
  REGION 1..33: note = peptide sequence within human TNFR2 that represents epitope that TNFR2 agonist antibodies or fragments thereof can bind to
  VARIANT 8: note = Xaa is Cys residue protected with ACM protecting group
  VARIANT 11: note = Xaa is Cys residue protected with ACM protecting group
  VARIANT 30: note = Xaa is Cys residue protected with ACM protecting group
CLSKQEGXRLXAPLRKCAFTPYAPEPGSTXRLC

SEQ ID NO: 1045 - protein, 24 aa, synthetic construct
  REGION 1..24: note = peptide sequence within human TNFR2 that represents epitope that TNFR2 agonist antibodies or fragments thereof can bind to
CNWVPEALSAGPGASSDQVETQAC

SEQ ID NO: 1046 - protein, 27 aa, synthetic construct
  REGION 1..27: note = peptide sequence within human TNFR2 that represents epitope that TNFR2 agonist antibodies or fragments thereof can bind to
  VARIANT 7: note = Xaa is Cys residue protected with ACM protecting group
ETSDVVXKPCAGGSGGTTSSTDICRPH

SEQ ID NO: 1047 - protein, 27 aa, synthetic construct
  REGION 1..27: note = peptide sequence within human TNFR2 that represents epitope that TNFR2 agonist antibodies or fragments thereof can bind to
  VARIANT 2: note = Xaa is Cys residue protected with ACM protecting group
VXKPCAPGTFSGGSGGTSSTDICRPHQ

SEQ ID NO: 1048 - protein, 33 aa, synthetic construct
  REGION 1..33: note = peptide sequence within human TNFR2 that represents epitope that TNFR2 agonist antibodies or fragments thereof can bind to
  VARIANT 14: note = Xaa is Cys residue protected with ACM protecting group
  VARIANT 23: note = Xaa is Cys residue protected with ACM protecting group
CVAIPGNASMDAVXTSCAPLRKXRPGFGVARPC

SEQ ID NO: 1049 - protein, 27 aa, synthetic construct
  REGION 1..27: note = peptide sequence within human TNFR2 that represents epitope that TNFR2 agonist antibodies or fragments thereof can bind to
  VARIANT 5: note = Xaa is Cys residue protected with ACM protecting group
SDVVXKPCAPGGGSGGTSSTDICRPHQ

SEQ ID NO: 1050 - protein, 27 aa, synthetic construct
  REGION 1..27: note = peptide sequence within human TNFR2 that represents epitope that TNFR2 agonist antibodies or fragments thereof can bind to
QICNVVAIPGNGGSGGCTSTSPTRSMA

SEQ ID NO: 1051 - protein, 15 aa, synthetic construct
  REGION 1..15: note = peptide sequence within human TNFR2 that represents epitope that TNFR2 agonist antibodies or fragments thereof can bind to
DICRPHQICNVVAIP

SEQ ID NO: 1052 - protein, 17 aa, synthetic construct
  REGION 1..17: note = peptide sequence within human TNFR2 that represents epitope that TNFR2 agonist antibodies or fragments thereof can bind to
CLWNWVPEALSAGSRAC

SEQ ID NO: 1053 - protein, 33 aa, synthetic construct
  REGION 1..33: note = peptide sequence within human TNFR2 that represents epitope that TNFR2 agonist antibodies or fragments thereof can bind to
  VARIANT 9: note = Xaa is Cys residue protected with ACM protecting group
  VARIANT 23: note = Xaa is Cys residue protected with ACM protecting group
CAPEPGSTXRLREYYDCAPLRKXRPGFGVARPC

SEQ ID NO: 1054 - protein, 27 aa, synthetic construct
  REGION 1..27: note = peptide sequence within human TNFR2 that represents epitope that TNFR2 agonist antibodies or fragments thereof can bind to
  VARIANT 19: note = Xaa is Cys residue protected with ACM protecting group
  VARIANT 22: note = Xaa is Cys residue protected with ACM protecting group
STCRLREYYDQGGSGGMCXSKXSPGQH

SEQ ID NO: 1055 - protein, 27 aa, synthetic construct
  REGION 1..27: note = peptide sequence within human TNFR2 that represents epitope that TNFR2 agonist antibodies or fragments thereof can bind to
  VARIANT 4: note = Xaa is Cys residue protected with ACM protecting group
  VARIANT 11: note = Xaa is Cys residue protected with ACM protecting group
VPEXLSCGSRXGGSGGTQACTREQNRI

SEQ ID NO: 1056 - protein, 27 aa, synthetic construct
  REGION 1..27: note = peptide sequence within human TNFR2 that represents epitope that TNFR2 agonist antibodies or fragments thereof can bind to
  VARIANT 7: note = Xaa is Cys residue protected with ACM protecting group
  VARIANT 26: note = Xaa is Cys residue protected with ACM protecting group
LSCGSRXSSDQGGSGGACTREQNRIXT

SEQ ID NO: 1057 - protein, 33 aa, synthetic construct
  REGION 1..33: note = peptide sequence within human TNFR2 that represents epitope that TNFR2 agonist antibodies or fragments thereof can bind to
  VARIANT 2: note = Xaa is Cys residue protected with ACM protecting group
  VARIANT 20: note = Xaa is Cys residue protected with ACM protecting group
CXEDSTYTQLWNWVPECQIXNVVAIPGNASMDC

SEQ ID NO: 1058 - protein, 27 aa, synthetic construct
  REGION 1..27: note = peptide sequence within human TNFR2 that represents epitope that TNFR2 agonist antibodies or fragments thereof can bind to
  VARIANT 6: note = Xaa is Cys residue protected with ACM protecting group
  VARIANT 27: note = Xaa is Cys residue protected with ACM protecting group
SCGSRXSSDQVGGSGGQACTREQNRIX

SEQ ID NO: 1059 - protein, 27 aa, synthetic construct
  REGION 1..27: note = peptide sequence within human TNFR2 that represents epitope that TNFR2 agonist antibodies or fragments thereof can bind to
  VARIANT 19: note = Xaa is Cys residue protected with ACM protecting group
SRCSSDQVETQGGSGGQAXTREQNRIC

SEQ ID NO: 1060 - protein, 33 aa, synthetic construct
  REGION 1..33: note = peptide sequence within human TNFR2 that represents epitope that TNFR2 agonist antibodies or fragments thereof can bind to
  VARIANT 23: note = Xaa is Cys residue protected with ACM protecting group
CTSPTRSMAPGAVHLPCAPLRKXRPGFGVARPC

SEQ ID NO: 1061 - protein, 27 aa, synthetic construct
  REGION 1..27: note = peptide sequence within human TNFR2 that represents epitope that TNFR2 agonist antibodies or fragments thereof can bind to
  VARIANT 2: note = Xaa is Cys residue protected with ACM protecting group
  VARIANT 19: note = Xaa is Cys residue protected with ACM protecting group
SXGSRCSSDQVGGSGGQAXTREQNRIC

SEQ ID NO: 1062 - protein, 27 aa, synthetic construct
  REGION 1..27: note = peptide sequence within human TNFR2 that represents epitope that TNFR2 agonist antibodies or fragments thereof can bind to
  VARIANT 8: note = Xaa is Cys residue protected with ACM protecting group
  VARIANT 18: note = Xaa is Cys residue protected with ACM protecting group
KQEGCRLXAPLGGSGGLXAPLRKCRPG

SEQ ID NO: 1063 - protein, 17 aa, synthetic construct
  REGION 1..17: note = peptide sequence within human TNFR2 that represents epitope that TNFR2 agonist antibodies or fragments thereof can bind to
CAATREQNRIATARPGC

SEQ ID NO: 1064 - protein, 33 aa, synthetic construct
  REGION 1..33: note = peptide sequence within human TNFR2 that represents epitope that TNFR2 agonist antibodies or fragments thereof can bind to
  VARIANT 2: note = Xaa is Cys residue protected with ACM protecting group
  VARIANT 3: note = Xaa is Cys residue protected with ACM protecting group
  VARIANT 6: note = Xaa is Cys residue protected with ACM protecting group
  VARIANT 16: note = Xaa is Cys residue protected with ACM protecting group
  VARIANT 23: note = Xaa is Cys residue protected with ACM protecting group
CXXSKXSPGQHAKVFXCAPLRKXRPGFGVARPC

SEQ ID NO: 1065 - protein, 33 aa, synthetic construct
  REGION 1..33: note = peptide sequence within human TNFR2 that represents epitope that TNFR2 agonist antibodies or fragments thereof can bind to
  VARIANT 5: note = Xaa is Cys residue protected with ACM protecting group
  VARIANT 8: note = Xaa is Cys residue protected with ACM protecting group
  VARIANT 25: note = Xaa is Cys residue protected with ACM protecting group
CDVVXKPXAPGTFSNTCNASMDAVXTSTSPTRC

SEQ ID NO: 1066 - protein, 27 aa, synthetic construct
  REGION 1..27: note = peptide sequence within human TNFR2 that represents epitope that TNFR2 agonist antibodies or fragments thereof can bind to
  VARIANT 1: note = Xaa is Cys residue protected with ACM protecting group
  VARIANT 4: note = Xaa is Cys residue protected with ACM protecting group
  VARIANT 18: note = Xaa is Cys residue protected with ACM protecting group
XLSXGSRCSSDGGSGGAXTREQNRICT

SEQ ID NO: 1067 - protein, 27 aa, synthetic construct
  REGION 1..27: note = peptide sequence within human TNFR2 that represents epitope that TNFR2 agonist antibodies or fragments thereof can bind to
  VARIANT 2: note = Xaa is Cys residue protected with ACM protecting group
  VARIANT 9: note = Xaa is Cys residue protected with ACM protecting group
EXLSCGSRXSSGGSGGTQACTREQNRI

SEQ ID NO: 1068 - protein, 33 aa, synthetic construct
  REGION 1..33: note = peptide sequence within human TNFR2 that represents epitope that TNFR2 agonist antibodies or fragments thereof can bind to
  VARIANT 12: note = Xaa is Cys residue protected with ACM protecting group
  VARIANT 15: note = Xaa is Cys residue protected with ACM protecting group
  VARIANT 25: note = Xaa is Cys residue protected with ACM protecting group
CYTQLWNWVPEXLSXGCNASMDAVXTSTSPTRC

SEQ ID NO: 1069 - protein, 27 aa, synthetic construct
  REGION 1..27: note = peptide sequence within human TNFR2 that represents epitope that TNFR2 agonist antibodies or fragments thereof can bind to
  VARIANT 3: note = Xaa is Cys residue protected with ACM protecting group
  VARIANT 17: note = Xaa is Cys residue protected with ACM protecting group
  VARIANT 27: note = Xaa is Cys residue protected with ACM protecting group
LSXGSRCSSDQGGSGGXTREQNRICTX

SEQ ID NO: 1070 - protein, 33 aa, synthetic construct
  REGION 1..33: note = peptide sequence within human TNFR2 that represents epitope that TNFR2 agonist antibodies or fragments thereof can bind to
  VARIANT 2: note = Xaa is Cys residue protected with ACM protecting group
  VARIANT 5: note = Xaa is Cys residue protected with ACM protecting group
  VARIANT 9: note = Xaa is Cys residue protected with ACM protecting group
  VARIANT 23: note = Xaa is Cys residue protected with ACM protecting group
CXLSXGSRXSSDQVETCAPLRKXRPGFGVARPC

SEQ ID NO: 1071 - protein, 27 aa, synthetic construct
  REGION 1..27: note = peptide sequence within human TNFR2 that represents epitope that TNFR2 agonist antibodies or fragments thereof can bind to
  VARIANT 5: note = Xaa is Cys residue protected with ACM protecting group
WVPEXLSCGSRGGSGGTQACTREQNRI

SEQ ID NO: 1072 - protein, 27 aa, synthetic construct
  REGION 1..27: note = peptide sequence within human TNFR2 that represents epitope that TNFR2 agonist antibodies or fragments thereof can bind to
  VARIANT 1: note = Xaa is Cys residue protected with ACM protecting group
  VARIANT 9: note = Xaa is Cys residue protected with ACM protecting group
  VARIANT 25: note = Xaa is Cys residue protected with ACM protecting group
XTREQNRIXTCGGSGGCALSKQEGXRL

SEQ ID NO: 1073 - protein, 15 aa, synthetic construct
  REGION 1..15: note = peptide sequence within human TNFR2 that represents epitope that TNFR2 agonist antibodies or fragments thereof can bind to
SDQVETQACTREQNR

SEQ ID NO: 1074 - protein, 27 aa, synthetic construct
  REGION 1..27: note = peptide sequence within human TNFR2 that represents epitope that TNFR2 agonist antibodies or fragments thereof can bind to
  VARIANT 1: note = Xaa is Cys residue protected with ACM protecting group
  VARIANT 19: note = Xaa is Cys residue protected with ACM protecting group
XGSRCSSDQVEGGSGGQAXTREQNRIC

SEQ ID NO: 1075 - protein, 27 aa, synthetic construct
  REGION 1..27: note = peptide sequence within human TNFR2 that represents epitope that TNFR2 agonist antibodies or fragments thereof can bind to
  VARIANT 4: note = Xaa is Cys residue protected with ACM protecting group
  VARIANT 25: note = Xaa is Cys residue protected with ACM protecting group
NRIXTCRPGWYGGSGGCALSKQEGXRL

SEQ ID NO: 1076 - protein, 33 aa, synthetic construct
  REGION 1..33: note = peptide sequence within human TNFR2 that represents epitope that TNFR2 agonist antibodies or fragments thereof can bind to
  VARIANT 3: note = Xaa is Cys residue protected with ACM protecting group
  VARIANT 6: note = Xaa is Cys residue protected with ACM protecting group
  VARIANT 12: note = Xaa is Cys residue protected with ACM protecting group
  VARIANT 28: note = Xaa is Cys residue protected with ACM protecting group
  VARIANT 29: note = Xaa is Cys residue protected with ACM protecting group
  VARIANT 32: note = Xaa is Cys residue protected with ACM protecting group
CGXRLXAPLRKXRPGFCREYYDQTAQMXXSKXC

SEQ ID NO: 1077 - protein, 15 aa, synthetic construct
  REGION 1..15: note = peptide sequence within human TNFR2 that represents epitope that TNFR2 agonist antibodies or fragments thereof can bind to
GTFSNTTSSTAACRP

SEQ ID NO: 1078 - protein, 33 aa, synthetic construct
  REGION 1..33: note = peptide sequence within human TNFR2 that represents epitope that TNFR2 agonist antibodies or fragments thereof can bind to
  VARIANT 4: note = Xaa is Cys residue protected with ACM protecting group
  VARIANT 7: note = Xaa is Cys residue protected with ACM protecting group
  VARIANT 25: note = Xaa is Cys residue protected with ACM protecting group
CTVXDSXEDSTYTQLWCNASMDAVXTSTSPTRC

SEQ ID NO: 1079 - protein, 27 aa, synthetic construct
  REGION 1..27: note = peptide sequence within human TNFR2 that represents epitope that TNFR2 agonist antibodies or fragments thereof can bind to
  VARIANT 20: note = Xaa is Cys residue protected with ACM protecting group
  VARIANT 23: note = Xaa is Cys residue protected with ACM protecting group
PGSTCRLREYYGGSGGQMCXSKXSPGQ

SEQ ID NO: 1080 - protein, 27 aa, synthetic construct
  REGION 1..27: note = peptide sequence within human TNFR2 that represents epitope that TNFR2 agonist antibodies or fragments thereof can bind to
  VARIANT 5: note = Xaa is Cys residue protected with ACM protecting group
WVPEXLSCGSRGGSGGETQACTREQNR

SEQ ID NO: 1081 - protein, 27 aa, synthetic construct
  REGION 1..27: note = peptide sequence within human TNFR2 that represents epitope that TNFR2 agonist antibodies or fragments thereof can bind to
  VARIANT 7: note = Xaa is Cys residue protected with ACM protecting group
LSCGSRXSSDQGGSGGTQACTREQNRI

SEQ ID NO: 1082 - protein, 27 aa, synthetic construct
  REGION 1..27: note = peptide sequence within human TNFR2 that represents epitope that TNFR2 agonist antibodies or fragments thereof can bind to
  VARIANT 2: note = Xaa is Cys residue protected with ACM protecting group
  VARIANT 5: note = Xaa is Cys residue protected with ACM protecting group
  VARIANT 17: note = Xaa is Cys residue protected with ACM protecting group
  VARIANT 27: note = Xaa is Cys residue protected with ACM protecting group
EXLSXGSRCSSGGSGGXTREQNRICTX

SEQ ID NO: 1083 - protein, 27 aa, synthetic construct
  REGION 1..27: note = peptide sequence within human TNFR2 that represents epitope that TNFR2 agonist antibodies or fragments thereof can bind to
  VARIANT 1: note = Xaa is Cys residue protected with ACM protecting group
  VARIANT 4: note = Xaa is Cys residue protected with ACM protecting group
  VARIANT 26: note = Xaa is Cys residue protected with ACM protecting group
XLSXGSRCSSDGGSGGTREQNRICTXR

SEQ ID NO: 1084 - protein, 15 aa, synthetic construct
  REGION 1..15: note = peptide sequence within human TNFR2 that represents epitope that TNFR2 agonist antibodies or fragments thereof can bind to
PYAPEPGSTCRLREY

SEQ ID NO: 1085 - protein, 33 aa, synthetic construct
  REGION 1..33: note = peptide sequence within human TNFR2 that represents epitope that TNFR2 agonist antibodies or fragments thereof can bind to
  VARIANT 2: note = Xaa is Cys residue protected with ACM protecting group
  VARIANT 3: note = Xaa is Cys residue protected with ACM protecting group
  VARIANT 6: note = Xaa is Cys residue protected with ACM protecting group
  VARIANT 16: note = Xaa is Cys residue protected with ACM protecting group
  VARIANT 25: note = Xaa is Cys residue protected with ACM protecting group
CXXSKXSPGQHAKVFXCNASMDAVXTSTSPTRC

SEQ ID NO: 1086 - protein, 33 aa, synthetic construct
  REGION 1..33: note = peptide sequence within human TNFR2 that represents epitope that TNFR2 agonist antibodies or fragments thereof can bind to
  VARIANT 8: note = Xaa is Cys residue protected with ACM protecting group
  VARIANT 14: note = Xaa is Cys residue protected with ACM protecting group
  VARIANT 25: note = Xaa is Cys residue protected with ACM protecting group
CTSSTDIXRPHQIXNVCNASMDAVXTSTSPTRC

SEQ ID NO: 1087 - protein, 33 aa, synthetic construct
  REGION 1..33: note = peptide sequence within human TNFR2 that represents epitope that TNFR2 agonist antibodies or fragments thereof can bind to
  VARIANT 2: note = Xaa is Cys residue protected with ACM protecting group
  VARIANT 3: note = Xaa is Cys residue protected with ACM protecting group
  VARIANT 6: note = Xaa is Cys residue protected with ACM protecting group
  VARIANT 16: note = Xaa is Cys residue protected with ACM protecting group
  VARIANT 20: note = Xaa is Cys residue protected with ACM protecting group
CXXSKXSPGQHAKVFXCAVXTSTSPTRSMAPGC

SEQ ID NO: 1088 - protein, 27 aa, synthetic construct
  REGION 1..27: note = peptide sequence within human TNFR2 that represents epitope that TNFR2 agonist antibodies or fragments thereof can bind to
  VARIANT 3: note = Xaa is Cys residue protected with ACM protecting group
  VARIANT 10: note = Xaa is Cys residue protected with ACM protecting group
PEXLSCGSRXSGGSGGTQACTREQNRI

SEQ ID NO: 1089 - protein, 27 aa, synthetic construct
  REGION 1..27: note = peptide sequence within human TNFR2 that represents epitope that TNFR2 agonist antibodies or fragments thereof can bind to
  VARIANT 26: note = Xaa is Cys residue protected with ACM protecting group
GSRCSSDQVETGGSGGTREQNRICTXR

SEQ ID NO: 1090 - protein, 27 aa, synthetic construct
  REGION 1..27: note = peptide sequence within human TNFR2 that represents epitope that TNFR2 agonist antibodies or fragments thereof can bind to
  VARIANT 5: note = Xaa is Cys residue protected with ACM protecting group
  VARIANT 20: note = Xaa is Cys residue protected with ACM protecting group
KQEGXRLCAPLGGSGGCKPXAPGTFSN

SEQ ID NO: 1091 - protein, 27 aa, synthetic construct
  REGION 1..27: note = peptide sequence within human TNFR2 that represents epitope that TNFR2 agonist antibodies or fragments thereof can bind to
PHQICNVVAIPGGSGGCTSTSPTRSMA

SEQ ID NO: 1092 - protein, 33 aa, synthetic construct
  REGION 1..33: note = peptide sequence within human TNFR2 that represents epitope that TNFR2 agonist antibodies or fragments thereof can bind to
  VARIANT 23: note = Xaa is Cys residue protected with ACM protecting group
CLPMGPSPPAEGSTGDCAPLRKXRPGFGVARPC

SEQ ID NO: 1093 - protein, 27 aa, synthetic construct
  REGION 1..27: note = peptide sequence within human TNFR2 that represents epitope that TNFR2 agonist antibodies or fragments thereof can bind to
  VARIANT 1: note = Xaa is Cys residue protected with ACM protecting group
  VARIANT 8: note = Xaa is Cys residue protected with ACM protecting group
  VARIANT 25: note = Xaa is Cys residue protected with ACM protecting group
  VARIANT 27: note = Xaa is Cys residue protected with ACM protecting group
XLSCGSRXSSDGGSGGCTREQNRIXTX

SEQ ID NO: 1094 - protein, 27 aa, synthetic construct
  REGION 1..27: note = peptide sequence within human TNFR2 that represents epitope that TNFR2 agonist antibodies or fragments thereof can bind to
  VARIANT 1: note = Xaa is Cys residue protected with ACM protecting group
XKPCAPGTFSNGGSGGTTSSTDICRPH

SEQ ID NO: 1095 - protein, 33 aa, synthetic construct
  REGION 1..33: note = peptide sequence within human TNFR2 that represents epitope that TNFR2 agonist antibodies or fragments thereof can bind to
  VARIANT 7: note = Xaa is Cys residue protected with ACM protecting group
  VARIANT 8: note = Xaa is Cys residue protected with ACM protecting group
  VARIANT 11: note = Xaa is Cys residue protected with ACM protecting group
  VARIANT 30: note = Xaa is Cys residue protected with ACM protecting group
CQTAQMXXSKXSPGQHCAFTPYAPEPGSTXRLC

SEQ ID NO: 1096 - protein, 15 aa, synthetic construct
  REGION 1..15: note = peptide sequence within human TNFR2 that represents epitope that TNFR2 agonist antibodies or fragments thereof can bind to
TSSTDICRPHQICNV

SEQ ID NO: 1097 - protein, 17 aa, synthetic construct
  REGION 1..17: note = peptide sequence within human TNFR2 that represents epitope that TNFR2 agonist antibodies or fragments thereof can bind to
CEGARLAAPLRAGRPGC

SEQ ID NO: 1098 - protein, 33 aa, synthetic construct
  REGION 1..33: note = peptide sequence within human TNFR2 that represents epitope that TNFR2 agonist antibodies or fragments thereof can bind to
  VARIANT 4: note = Xaa is Cys residue protected with ACM protecting group
  VARIANT 12: note = Xaa is Cys residue protected with ACM protecting group
  VARIANT 14: note = Xaa is Cys residue protected with ACM protecting group
  VARIANT 30: note = Xaa is Cys residue protected with ACM protecting group
CQAXTREQNRIXTXRPCAFTPYAPEPGSTXRLC

SEQ ID NO: 1099 - protein, 27 aa, synthetic construct
  REGION 1..27: note = peptide sequence within human TNFR2 that represents epitope that TNFR2 agonist antibodies or fragments thereof can bind to
  VARIANT 2: note = Xaa is Cys residue protected with ACM protecting group
  VARIANT 23: note = Xaa is Cys residue protected with ACM protecting group
SXGSRCSSDQVGGSGGQNRICTXRPGW

SEQ ID NO: 1100 - protein, 33 aa, synthetic construct
  REGION 1..33: note = peptide sequence within human TNFR2 that represents epitope that TNFR2 agonist antibodies or fragments thereof can bind to
  VARIANT 9: note = Xaa is Cys residue protected with ACM protecting group
  VARIANT 22: note = Xaa is Cys residue protected with ACM protecting group
  VARIANT 23: note = Xaa can be any naturally occurring amino acid
CDQVETQAXTREQNRICAPLRXXRPGFGVARPC

SEQ ID NO: 1101 - protein, 27 aa, synthetic construct
  REGION 1..27: note = peptide sequence within human TNFR2 that represents epitope that TNFR2 agonist antibodies or fragments thereof can bind to
  VARIANT 2: note = Xaa is Cys residue protected with ACM protecting group
  VARIANT 25: note = Xaa is Cys residue protected with ACM protecting group
VXKPCAPGTFSGGSGGDICRPHQIXNV

SEQ ID NO: 1102 - protein, 27 aa, synthetic construct
  REGION 1..27: note = peptide sequence within human TNFR2 that represents epitope that TNFR2 agonist antibodies or fragments thereof can bind to
  VARIANT 1: note = Xaa is Cys residue protected with ACM protecting group
  VARIANT 8: note = Xaa is Cys residue protected with ACM protecting group
  VARIANT 26: note = Xaa is Cys residue protected with ACM protecting group
XLSCGSRXSSDGGSGGACTREQNRIXT

SEQ ID NO: 1103 - protein, 27 aa, synthetic construct
  REGION 1..27: note = peptide sequence within human TNFR2 that represents epitope that TNFR2 agonist antibodies or fragments thereof can bind to
  VARIANT 19: note = Xaa is Cys residue protected with ACM protecting group
GSRCSSDQVETGGSGGQAXTREQNRIC

SEQ ID NO: 1104 - protein, 33 aa, synthetic construct
  REGION 1..33: note = peptide sequence within human TNFR2 that represents epitope that TNFR2 agonist antibodies or fragments thereof can bind to
  VARIANT 7: note = Xaa is Cys residue protected with ACM protecting group
  VARIANT 8: note = Xaa is Cys residue protected with ACM protecting group
  VARIANT 11: note = Xaa is Cys residue protected with ACM protecting group
  VARIANT 20: note = Xaa is Cys residue protected with ACM protecting group
  VARIANT 28: note = Xaa is Cys residue protected with ACM protecting group
  VARIANT 30: note = Xaa is Cys residue protected with ACM protecting group
CQTAQMXXSKXSPGQHCQAXTREQNRIXTXRPC

SEQ ID NO: 1105 - protein, 27 aa, synthetic construct
  REGION 1..27: note = peptide sequence within human TNFR2 that represents epitope that TNFR2 agonist antibodies or fragments thereof can bind to
  VARIANT 2: note = Xaa is Cys residue protected with ACM protecting group
YXALSKQEGCRGGSGGKCRPGFGVARP

SEQ ID NO: 1106 - protein, 27 aa, synthetic construct
  REGION 1..27: note = peptide sequence within human TNFR2 that represents epitope that TNFR2 agonist antibodies or fragments thereof can bind to
  VARIANT 26: note = Xaa is Cys residue protected with ACM protecting group
PCAPGTFSNTTGGSGGTDICRPHQIXN

SEQ ID NO: 1107 - protein, 27 aa, synthetic construct
  REGION 1..27: note = peptide sequence within human TNFR2 that represents epitope that TNFR2 agonist antibodies or fragments thereof can bind to
  VARIANT 3: note = Xaa is Cys residue protected with ACM protecting group
DIXRPHQICNVGGSGGVCTSTSPTRSM

SEQ ID NO: 1108 - protein, 17 aa, synthetic construct
  REGION 1..17: note = peptide sequence within human TNFR2 that represents epitope that TNFR2 agonist antibodies or fragments thereof can bind to
CYTQLWNWVPEGASAGC

SEQ ID NO: 1109 - protein, 27 aa, synthetic construct
  REGION 1..27: note = peptide sequence within human TNFR2 that represents epitope that TNFR2 agonist antibodies or fragments thereof can bind to
  VARIANT 20: note = Xaa is Cys residue protected with ACM protecting group
  VARIANT 23: note = Xaa is Cys residue protected with ACM protecting group
GSTCRLREYYDGGSGGQMCXSKXSPGQ

SEQ ID NO: 1110 - protein, 27 aa, synthetic construct
  REGION 1..27: note = peptide sequence within human TNFR2 that represents epitope that TNFR2 agonist antibodies or fragments thereof can bind to
  VARIANT 7: note = Xaa is Cys residue protected with ACM protecting group
QEGCRLXAPLRGGSGGKCRPGFGVARP

SEQ ID NO: 1111 - protein, 33 aa, synthetic construct
  REGION 1..33: note = peptide sequence within human TNFR2 that represents epitope that TNFR2 agonist antibodies or fragments thereof can bind to
  VARIANT 9: note = Xaa is Cys residue protected with ACM protecting group
  VARIANT 23: note = Xaa is Cys residue protected with ACM protecting group
CNASMDAVXTSTSPTRCAPLRKXRPGFGVARPC

SEQ ID NO: 1112 - protein, 33 aa, synthetic construct
  REGION 1..33: note = peptide sequence within human TNFR2 that represents epitope that TNFR2 agonist antibodies or fragments thereof can bind to
  VARIANT 12: note = Xaa is Cys residue protected with ACM protecting group
  VARIANT 13: note = Xaa is Cys residue protected with ACM protecting group
  VARIANT 16: note = Xaa is Cys residue protected with ACM protecting group
  VARIANT 25: note = Xaa is Cys residue protected with ACM protecting group
CREYYDQTAQMXXSKXCNASMDAVXTSTSPTRC

SEQ ID NO: 1113 - protein, 27 aa, synthetic construct
  REGION 1..27: note = peptide sequence within human TNFR2 that represents epitope that TNFR2 agonist antibodies or fragments thereof can bind to
  VARIANT 5: note = Xaa is Cys residue protected with ACM protecting group
  VARIANT 27: note = Xaa is Cys residue protected with ACM protecting group
CGSRXSSDQVEGGSGGQACTREQNRIX

SEQ ID NO: 1114 - protein, 33 aa, synthetic construct
  REGION 1..33: note = peptide sequence within human TNFR2 that represents epitope that TNFR2 agonist antibodies or fragments thereof can bind to
  VARIANT 25: note = Xaa is Cys residue protected with ACM protecting group
CLPAQVAFTPYAPEPGCNASMDAVXTSTSPTRC

SEQ ID NO: 1115 - protein, 24 aa, synthetic construct
  REGION 1..24: note = peptide sequence within human TNFR2 that represents epitope that TNFR2 agonist antibodies or fragments thereof can bind to
CLWNWVPEALSPGSRASSDQVETC

SEQ ID NO: 1116 - protein, 27 aa, synthetic construct
  REGION 1..27: note = peptide sequence within human TNFR2 that represents epitope that TNFR2 agonist antibodies or fragments thereof can bind to
  VARIANT 2: note = Xaa is Cys residue protected with ACM protecting group
  VARIANT 18: note = Xaa is Cys residue protected with ACM protecting group
SXGSRCSSDQVGGSGGAXTREQNRICT

SEQ ID NO: 1117 - protein, 17 aa, synthetic construct
  REGION 1..17: note = peptide sequence within human TNFR2 that represents epitope that TNFR2 agonist antibodies or fragments thereof can bind to
CSTAPSTSFLLPMGPSC

SEQ ID NO: 1118 - protein, 33 aa, synthetic construct; identical to SEQ ID NO: 1098
  REGION 1..33: note = peptide sequence within human TNFR2 that represents epitope that TNFR2 agonist antibodies or fragments thereof can bind to
  VARIANT 4: note = Xaa is Cys residue protected with ACM protecting group
  VARIANT 12: note = Xaa is Cys residue protected with ACM protecting group
  VARIANT 14: note = Xaa is Cys residue protected with ACM protecting group
  VARIANT 30: note = Xaa is Cys residue protected with ACM protecting group

SEQ ID NO: 1119 - protein, 33 aa, synthetic construct
  REGION 1..33: note = peptide sequence within human TNFR2 that represents epitope that TNFR2 agonist antibodies or fragments thereof can bind to
  VARIANT 4: note = Xaa is Cys residue protected with ACM protecting group
  VARIANT 23: note = Xaa is Cys residue protected with ACM protecting group
CAVXTSTSPTRSMAPGCAPLRKXRPGFGVARPC

SEQ ID NO: 1120 - protein, 22 aa, synthetic construct
  REGION 1..22: note = peptide sequence within human TNFR2 that represents epitope that TNFR2 agonist antibodies or fragments thereof can bind to
  VARIANT 5: note = Xaa is Cys residue protected with ACM protecting group
  VARIANT 21: note = Xaa is Cys residue protected with ACM protecting group
QNRIXTCRPGWYCALSKQEGXR

SEQ ID NO: 1121 - protein, 27 aa, synthetic construct
  REGION 1..27: note = peptide sequence within human TNFR2 that represents epitope that TNFR2 agonist antibodies or fragments thereof can bind to
  VARIANT 4: note = Xaa is Cys residue protected with ACM protecting group
  VARIANT 7: note = Xaa is Cys residue protected with ACM protecting group
  VARIANT 26: note = Xaa is Cys residue protected with ACM protecting group
VPEXLSXGSRCGGSGGTREQNRICTXR

SEQ ID NO: 1122 - protein, 27 aa, synthetic construct
  REGION 1..27: note = peptide sequence within human TNFR2 that represents epitope that TNFR2 agonist antibodies or fragments thereof can bind to
  VARIANT 1: note = Xaa is Cys residue protected with ACM protecting group
XKPCAPGTFSNGGSGGTSSTDICRPHQ

SEQ ID NO: 1123 - protein, 27 aa, synthetic construct
  REGION 1..27: note = peptide sequence within human TNFR2 that represents epitope that TNFR2 agonist antibodies or fragments thereof can bind to
  VARIANT 6: note = Xaa is Cys residue protected with ACM protecting group
  VARIANT 25: note = Xaa is Cys residue protected with ACM protecting group
  VARIANT 27: note = Xaa is Cys residue protected with ACM protecting group
NWVPEXLSCGSGGSGGCTREQNRIXTX

SEQ ID NO: 1124 - protein, 33 aa, synthetic construct
  REGION 1..33: note = peptide sequence within human TNFR2 that represents epitope that TNFR2 agonist antibodies or fragments thereof can bind to
  VARIANT 12: note = Xaa is Cys residue protected with ACM protecting group
  VARIANT 13: note = Xaa is Cys residue protected with ACM protecting group
  VARIANT 16: note = Xaa is Cys residue protected with ACM protecting group
  VARIANT 23: note = Xaa is Cys residue protected with ACM protecting group
CREYYDQTAQMXXSKXCAPLRKXRPGFGVARPC

SEQ ID NO: 1125 - protein, 27 aa, synthetic construct
  REGION 1..27: note = peptide sequence within human TNFR2 that represents epitope that TNFR2 agonist antibodies or fragments thereof can bind to
  VARIANT 1: note = Xaa is Cys residue protected with ACM protecting group
  VARIANT 4: note = Xaa is Cys residue protected with ACM protecting group
  VARIANT 17: note = Xaa is Cys residue protected with ACM protecting group
  VARIANT 27: note = Xaa is Cys residue protected with ACM protecting group
XLSXGSRCSSDGGSGGXTREQNRICTX

SEQ ID NO: 1126 - protein, 27 aa, synthetic construct
  REGION 1..27: note = peptide sequence within human TNFR2 that represents epitope that TNFR2 agonist antibodies or fragments thereof can bind to
  VARIANT 4: note = Xaa is Cys residue protected with ACM protecting group
  VARIANT 20: note = Xaa is Cys residue protected with ACM protecting group
QEGXRLCAPLRGGSGGCKPXAPGTFSN

SEQ ID NO: 1127 - protein, 33 aa, synthetic construct
  REGION 1..33: note = peptide sequence within human TNFR2 that represents epitope that TNFR2 agonist antibodies or fragments thereof can bind to
  VARIANT 7: note = Xaa is Cys residue protected with ACM protecting group
  VARIANT 25: note = Xaa is Cys residue protected with ACM protecting group
CAPLRKXRPGFGVARPCNASMDAVXTSTSPTRC

SEQ ID NO: 1128 - protein, 27 aa, synthetic construct
  REGION 1..27: note = peptide sequence within human TNFR2 that represents epitope that TNFR2 agonist antibodies or fragments thereof can bind to
  VARIANT 3: note = Xaa is Cys residue protected with ACM protecting group
DIXRPHQICNVGGSGGCTSTSPTRSMA

SEQ ID NO: 1129 - protein, 33 aa, synthetic construct
  REGION 1..33: note = peptide sequence within human TNFR2 that represents epitope that TNFR2 agonist antibodies or fragments thereof can bind to
  VARIANT 4: note = Xaa is Cys residue protected with ACM protecting group
  VARIANT 12: note = Xaa is Cys residue protected with ACM protecting group
  VARIANT 14: note = Xaa is Cys residue protected with ACM protecting group
  VARIANT 20: note = Xaa is Cys residue protected with ACM protecting group
  VARIANT 28: note = Xaa is Cys residue protected with ACM protecting group
  VARIANT 30: note = Xaa is Cys residue protected with ACM protecting group
CQAXTREQNRIXTXRPCQAXTREQNRIXTXRPC

SEQ ID NO: 1130 - protein, 33 aa, synthetic construct
  REGION 1..33: note = peptide sequence within human TNFR2 that represents epitope that TNFR2 agonist antibodies or fragments thereof can bind to
  VARIANT 8: note = Xaa is Cys residue protected with ACM protecting group
  VARIANT 14: note = Xaa is Cys residue protected with ACM protecting group
  VARIANT 20: note = Xaa is Cys residue protected with ACM protecting group
  VARIANT 28: note = Xaa is Cys residue protected with ACM protecting group
  VARIANT 30: note = Xaa is Cys residue protected with ACM protecting group
CTSSTDIXRPHQIXNVCQAXTREQNRIXTXRPC

SEQ ID NO: 1131 - protein, 32 aa, synthetic construct
  REGION 1..32: note = peptide sequence within human TNFR2 that represents epitope that TNFR2 agonist antibodies or fragments thereof can bind to
  VARIANT 23: note = Xaa is Cys residue protected with ACM protecting group
CLPAQVAFTPYAPEPGCAPLRKXRPGFGVARP

SEQ ID NO: 1132 - protein, 27 aa, synthetic construct
  REGION 1..27: note = peptide sequence within human TNFR2 that represents epitope that TNFR2 agonist antibodies or fragments thereof can bind to
  VARIANT 4: note = Xaa is Cys residue protected with ACM protecting group
  VARIANT 11: note = Xaa is Cys residue protected with ACM protecting group
VPEXLSCGSRXGGSGGETQACTREQNR

SEQ ID NO: 1133 - protein, 33 aa, synthetic construct
  REGION 1..33: note = peptide sequence within human TNFR2 that represents epitope that TNFR2 agonist antibodies or fragments thereof can bind to
  VARIANT 14: note = Xaa is Cys residue protected with ACM protecting group
  VARIANT 23: note = Xaa is Cys residue protected with ACM protecting group
CAFTPYAPEPGSTXRLCAPLRKXRPGFGVARPC

SEQ ID NO: 1134 - protein, 33 aa, synthetic construct
  REGION 1..33: note = peptide sequence within human TNFR2 that represents epitope that TNFR2 agonist antibodies or fragments thereof can bind to
  VARIANT 3: note = Xaa is Cys residue protected with ACM protecting group
  VARIANT 9: note = Xaa is Cys residue protected with ACM protecting group
  VARIANT 23: note = Xaa is Cys residue protected with ACM protecting group
CIXRPHQIXNVVAIPGCAPLRKXRPGFGVARPC

SEQ ID NO: 1135 - protein, 32 aa, synthetic construct
  REGION 1..32: note = peptide sequence within human TNFR2 that represents epitope that TNFR2 agonist antibodies or fragments thereof can bind to
  VARIANT 23: note = Xaa is Cys residue protected with ACM protecting group
CSTSFLLPMGPSPPAECAPLRKXRPGFGVARP

SEQ ID NO: 1136 - protein, 27 aa, synthetic construct
  REGION 1..27: note = peptide sequence within human TNFR2 that represents epitope that TNFR2 agonist antibodies or fragments thereof can bind to
  VARIANT 1: note = Xaa is Cys residue protected with ACM protecting group
  VARIANT 9: note = Xaa is Cys residue protected with ACM protecting group
  VARIANT 26: note = Xaa is Cys residue protected with ACM protecting group
XTREQNRIXTCGGSGGYCALSKQEGXR

SEQ ID NO: 1137 - protein, 27 aa, synthetic construct
  REGION 1..27: note = peptide sequence within human TNFR2 that represents epitope that TNFR2 agonist antibodies or fragments thereof can bind to
CAPGTFSNTTSGGSGGTSSTDICRPHQ

SEQ ID NO: 1138 - protein, 33 aa, synthetic construct
  REGION 1..33: note = peptide sequence within human TNFR2 that represents epitope that TNFR2 agonist antibodies or fragments thereof can bind to
  VARIANT 7: note = Xaa is Cys residue protected with ACM protecting group
  VARIANT 8: note = Xaa is Cys residue protected with ACM protecting group
  VARIANT 11: note = Xaa is Cys residue protected with ACM protecting group
  VARIANT 25: note = Xaa is Cys residue protected with ACM protecting group
CQTAQMXXSKXSPGQHCNASMDAVXTSTSPTRC

SEQ ID NO: 1139 - protein, 33 aa, synthetic construct
  REGION 1..33: note = peptide sequence within human TNFR2 that represents epitope that TNFR2 agonist antibodies or fragments thereof can bind to
  VARIANT 9: note = Xaa is Cys residue protected with ACM protecting group
  VARIANT 25: note = Xaa is Cys residue protected with ACM protecting group
CNASMDAVXTSTSPTRCNASMDAVXTSTSPTRC

SEQ ID NO: 1140 - protein, 33 aa, synthetic construct
  REGION 1..33: note = peptide sequence within human TNFR2 that represents epitope that TNFR2 agonist antibodies or fragments thereof can bind to
  VARIANT 12: note = Xaa is Cys residue protected with ACM protecting group
  VARIANT 15: note = Xaa is Cys residue protected with ACM protecting group
  VARIANT 24: note = Xaa is Cys residue protected with ACM protecting group
  VARIANT 27: note = Xaa is Cys residue protected with ACM protecting group
CYTQLWNWVPEXLSXGCLSKQEGXRLXAPLRKC

SEQ ID NO: 1141 - protein, 27 aa, synthetic construct
  REGION 1..27: note = peptide sequence within human TNFR2 that represents epitope that TNFR2 agonist antibodies or fragments thereof can bind to
  VARIANT 20: note = Xaa is Cys residue protected with ACM protecting group
  VARIANT 23: note = Xaa is Cys residue protected with ACM protecting group
CRLREYYDQTAGGSGGQMCXSKXSPGQ

SEQ ID NO: 1142 - protein, 15 aa, synthetic construct
  REGION 1..15: note = peptide sequence within human TNFR2 that represents epitope that TNFR2 agonist antibodies or fragments thereof can bind to
MDAVCTSTSPTRSMA

SEQ ID NO: 1143 - protein, 33 aa, synthetic construct
  REGION 1..33: note = peptide sequence within human TNFR2 that represents epitope that TNFR2 agonist antibodies or fragments thereof can bind to
  VARIANT 20: note = Xaa is Cys residue protected with ACM protecting group
  VARIANT 28: note = Xaa is Cys residue protected with ACM protecting group
  VARIANT 30: note = Xaa is Cys residue protected with ACM protecting group
CAVHLPQPVSTRSQHTCQAXTREQNRIXTXRPC

SEQ ID NO: 1144 - protein, 27 aa, synthetic construct
  REGION 1..27: note = peptide sequence within human TNFR2 that represents epitope that TNFR2 agonist antibodies or fragments thereof can bind to
  VARIANT 3: note = Xaa is Cys residue protected with ACM protecting group
  VARIANT 6: note = Xaa is Cys residue protected with ACM protecting group
  VARIANT 26: note = Xaa is Cys residue protected with ACM protecting group
PEXLSXGSRCSGGSGGTREQNRICTXR

SEQ ID NO: 1145 - protein, 27 aa, synthetic construct
  REGION 1..27: note = peptide sequence within human TNFR2 that represents epitope that TNFR2 agonist antibodies or fragments thereof can bind to
  VARIANT 1: note = Xaa is Cys residue protected with ACM protecting group
  VARIANT 4: note = Xaa is Cys residue protected with ACM protecting group
  VARIANT 24: note = Xaa is Cys residue protected with ACM protecting group
XLSXGSRCSSDGGSGGEQNRICTXRPG

SEQ ID NO: 1146 - protein, 27 aa, synthetic construct
  REGION 1..27: note = peptide sequence within human TNFR2 that represents epitope that TNFR2 agonist antibodies or fragments thereof can bind to
  VARIANT 7: note = Xaa is Cys residue protected with ACM protecting group
  VARIANT 25: note = Xaa is Cys residue protected with ACM protecting group
REQNRIXTCRPGGSGGCALSKQEGXRL

SEQ ID NO: 1147 - protein, 33 aa, synthetic construct
  REGION 1..33: note = peptide sequence within human TNFR2 that represents epitope that TNFR2 agonist antibodies or fragments thereof can bind to
  VARIANT 7: note = Xaa is Cys residue protected with ACM protecting group
  VARIANT 8: note = Xaa is Cys residue protected with ACM protecting group
  VARIANT 11: note = Xaa is Cys residue protected with ACM protecting group
  VARIANT 23: note = Xaa is Cys residue protected with ACM protecting group
CQTAQMXXSKXSPGQHCAPLRKXRPGFGVARPC

SEQ ID NO: 1148 - protein, 33 aa, synthetic construct
  REGION 1..33: note = peptide sequence within human TNFR2 that represents epitope that TNFR2 agonist antibodies or fragments thereof can bind to
  VARIANT 2: note = Xaa is Cys residue protected with ACM protecting group
  VARIANT 4: note = Xaa is Cys residue protected with ACM protecting group
  VARIANT 10: note = Xaa is Cys residue protected with ACM protecting group
  VARIANT 23: note = Xaa is Cys residue protected with ACM protecting group
CXTXRPGWYXALSKQECAPLRKXRPGFGVARPC

SEQ ID NO: 1149 - protein, 33 aa, synthetic construct
  REGION 1..33: note = peptide sequence within human TNFR2 that represents epitope that TNFR2 agonist antibodies or fragments thereof can bind to
  VARIANT 7: note = Xaa is Cys residue protected with ACM protecting group
  VARIANT 10: note = Xaa is Cys residue protected with ACM protecting group
  VARIANT 14: note = Xaa is Cys residue protected with ACM protecting group
  VARIANT 25: note = Xaa is Cys residue protected with ACM protecting group
CNWVPEXLSXGSRXSSCNASMDAVXTSTSPTRC

SEQ ID NO: 1150 - protein, 27 aa, synthetic construct
  REGION 1..27: note = peptide sequence within human TNFR2 that represents epitope that TNFR2 agonist antibodies or fragments thereof can bind to
  VARIANT 26: note = Xaa is Cys residue protected with ACM protecting group
RCSSDQVETQAGGSGGTREQNRICTXR

SEQ ID NO: 1151 - protein, 15 aa, synthetic construct
  REGION 1..15: note = peptide sequence within human TNFR2 that represents epitope that TNFR2 agonist antibodies or fragments thereof can bind to
YDQTAQMCCSKCSPG

SEQ ID NO: 1152 - protein, 33 aa, synthetic construct
  REGION 1..33: note = peptide sequence within human TNFR2 that represents epitope that TNFR2 agonist antibodies or fragments thereof can bind to
  VARIANT 11: note = Xaa is Cys residue protected with ACM protecting group
  VARIANT 23: note = Xaa is Cys residue protected with ACM protecting group
CSPGQHAKVFXTKTSDCAPLRKXRPGFGVARPC

SEQ ID NO: 1153 - protein, 33 aa, synthetic construct
  REGION 1..33: note = peptide sequence within human TNFR2 that represents epitope that TNFR2 agonist antibodies or fragments thereof can bind to
  VARIANT 8: note = Xaa is Cys residue protected with ACM protecting group
  VARIANT 11: note = Xaa is Cys residue protected with ACM protecting group
  VARIANT 25: note = Xaa is Cys residue protected with ACM protecting group
CLSKQEGXRLXAPLRKCDQVETQAXTREQNRIC

SEQ ID NO: 1154 - protein, 18 aa, synthetic construct
  REGION 1..18: note = peptide sequence within human TNFR2 that represents epitope that TNFR2 agonist antibodies or fragments thereof can bind to
CSDQVETQPGTREQNRIC

SEQ ID NO: 1155 - protein, 27 aa, synthetic construct
  REGION 1..27: note = peptide sequence within human TNFR2 that represents epitope that TNFR2 agonist antibodies or fragments thereof can bind to
  VARIANT 6: note = Xaa is Cys residue protected with ACM protecting group
  VARIANT 25: note = Xaa is Cys residue protected with ACM protecting group
EQNRIXTCRPGGGSGGCALSKQEGXRL

SEQ ID NO: 1156 - protein, 27 aa, synthetic construct
  REGION 1..27: note = peptide sequence within human TNFR2 that represents epitope that TNFR2 agonist antibodies or fragments thereof can bind to
  VARIANT 4: note = Xaa is Cys residue protected with ACM protecting group
DVVXKPCAPGTGGSGGTSSTDICRPHQ

SEQ ID NO: 1157 - protein, 27 aa, synthetic construct
  REGION 1..27: note = peptide sequence within human TNFR2 that represents epitope that TNFR2 agonist antibodies or fragments thereof can bind to
  VARIANT 5: note = Xaa is Cys residue protected with ACM protecting group
STDIXRPHQICGGSGGCTSTSPTRSMA

SEQ ID NO: 1158 - protein, 33 aa, synthetic construct
  REGION 1..33: note = peptide sequence within human TNFR2 that represents epitope that TNFR2 agonist antibodies or fragments thereof can bind to
  VARIANT 25: note = Xaa is Cys residue protected with ACM protecting group
CPSTAPSTSFLLPMGPCNASMDAVXTSTSPTRC

SEQ ID NO: 1159 - protein, 15 aa, synthetic construct
  REGION 1..15: note = peptide sequence within human TNFR2 that represents epitope that TNFR2 agonist antibodies or fragments thereof can bind to
GAVHLPQPVSTRSQH

SEQ ID NO: 1160 - protein, 33 aa, synthetic construct
  REGION 1..33: note = peptide sequence within human TNFR2 that represents epitope that TNFR2 agonist antibodies or fragments thereof can bind to
  VARIANT 12: note = Xaa is Cys residue protected with ACM protecting group
  VARIANT 13: note = Xaa is Cys residue protected with ACM protecting group
  VARIANT 16: note = Xaa is Cys residue protected with ACM protecting group
  VARIANT 20: note = Xaa is Cys residue protected with ACM protecting group
  VARIANT 28: note = Xaa is Cys residue protected with ACM protecting group
  VARIANT 30: note = Xaa is Cys residue protected with ACM protecting group
CREYYDQTAQMXXSKXCQAXTREQNRIXTXRPC

SEQ ID NO: 1161 - protein, 33 aa, synthetic construct
  REGION 1..33: note = peptide sequence within human TNFR2 that represents epitope that TNFR2 agonist antibodies or fragments thereof can bind to
  VARIANT 2: note = Xaa is Cys residue protected with ACM protecting group
  VARIANT 3: note = Xaa is Cys residue protected with ACM protecting group
  VARIANT 6: note = Xaa is Cys residue protected with ACM protecting group
  VARIANT 16: note = Xaa is Cys residue protected with ACM protecting group
  VARIANT 20: note = Xaa is Cys residue protected with ACM protecting group
  VARIANT 28: note = Xaa is Cys residue protected with ACM protecting group
  VARIANT 30: note = Xaa is Cys residue protected with ACM protecting group
CXXSKXSPGQHAKVFXCQAXTREQNRIXTXRPC

SEQ ID NO: 1162 - protein, 33 aa, synthetic construct
  REGION 1..33: note = peptide sequence within human TNFR2 that represents epitope that TNFR2 agonist antibodies or fragments thereof can bind to
  VARIANT 5: note = Xaa is Cys residue protected with ACM protecting group
  VARIANT 13: note = Xaa is Cys residue protected with ACM protecting group
  VARIANT 16: note = Xaa is Cys residue protected with ACM protecting group
  VARIANT 20: note = Xaa is Cys residue protected with ACM protecting group
  VARIANT 28: note = Xaa is Cys residue protected with ACM protecting group
  VARIANT 30: note = Xaa is Cys residue protected with ACM protecting group
CGWYXALSKQEGXRLXCQAXTREQNRIXTXRPC

SEQ ID NO: 1163 - protein, 33 aa, synthetic construct
  REGION 1..33: note = peptide sequence within human TNFR2 that represents epitope that TNFR2 agonist antibodies or fragments thereof can bind to
  VARIANT 8: note = Xaa is Cys residue protected with ACM protecting group
  VARIANT 11: note = Xaa is Cys residue protected with ACM protecting group
  VARIANT 20: note = Xaa is Cys residue protected with ACM protecting group
  VARIANT 28: note = Xaa is Cys residue protected with ACM protecting group
  VARIANT 30: note = Xaa is Cys residue protected with ACM protecting group
CLSKQEGXRLXAPLRKCQAXTREQNRIXTXRPC

SEQ ID NO: 1164 - protein, 33 aa, synthetic construct
  REGION 1..33: note = peptide sequence within human TNFR2 that represents epitope that TNFR2 agonist antibodies or fragments thereof can bind to
  VARIANT 8: note = Xaa is Cys residue protected with ACM protecting group
  VARIANT 14: note = Xaa is Cys residue protected with ACM protecting group
  VARIANT 23: note = Xaa is Cys residue protected with ACM protecting group
CTSSTDIXRPHQIXNVCAPLRKXRPGFGVARPC

SEQ ID NO: 1165 - protein, 27 aa, synthetic construct
  REGION 1..27: note = peptide sequence within human TNFR2 that represents epitope that TNFR2 agonist antibodies or fragments thereof can bind to
  VARIANT 1: note = Xaa is Cys residue protected with ACM protecting group
  VARIANT 8: note = Xaa is Cys residue protected with ACM protecting group
XLSCGSRXSSDGGSGGTQACTREQNRI

SEQ ID NO: 1166 - protein, 33 aa, synthetic construct
  REGION 1..33: note = peptide sequence within human TNFR2 that represents epitope that TNFR2 agonist antibodies or fragments thereof can bind to
  VARIANT 9: note = Xaa is Cys residue protected with ACM protecting group
  VARIANT 30: note = Xaa is Cys residue protected with ACM protecting group
CDQVETQAXTREQNRICAFTPYAPEPGSTXRLC

SEQ ID NO: 1167 - protein, 33 aa, synthetic construct
  REGION 1..33: note = peptide sequence within human TNFR2 that represents epitope that TNFR2 agonist antibodies or fragments thereof can bind to
  VARIANT 9: note = Xaa is Cys residue protected with ACM protecting group
  VARIANT 20: note = Xaa is Cys residue protected with ACM protecting group
  VARIANT 28: note = Xaa is Cys residue protected with ACM protecting group
  VARIANT 30: note = Xaa is Cys residue protected with ACM protecting group
CNASMDAVXTSTSPTRCQAXTREQNRIXTXRPC

SEQ ID NO: 1168 - protein, 27 aa, synthetic construct
  REGION 1..27: note = peptide sequence within human TNFR2 that represents epitope that TNFR2 agonist antibodies or fragments thereof can bind to
  VARIANT 20: note = Xaa is Cys residue protected with ACM protecting group
  VARIANT 23: note = Xaa is Cys residue protected with ACM protecting group
PEPGSTCRLREGGSGGQMCXSKXSPGQ

SEQ ID NO: 1169 - protein, 27 aa, synthetic construct
  REGION 1..27: note = peptide sequence within human TNFR2 that represents epitope that TNFR2 agonist antibodies or fragments thereof can bind to
  VARIANT 20: note = Xaa is Cys residue protected with ACM protecting group
  VARIANT 23: note = Xaa is Cys residue protected with ACM protecting group
STCRLREYYDQGGSGGQMCXSKXSPGQ

SEQ ID NO: 1170 - protein, 15 aa, synthetic construct
  REGION 1..15: note = peptide sequence within human TNFR2 that represents epitope that TNFR2 agonist antibodies or fragments thereof can bind to
LRKCRPGFGVGAPGT

SEQ ID NO: 1171 - protein, 33 aa, synthetic construct
  REGION 1..33: note = peptide sequence within human TNFR2 that represents epitope that TNFR2 agonist antibodies or fragments thereof can bind to
  VARIANT 8: note = Xaa is Cys residue protected with ACM protecting group
  VARIANT 11: note = Xaa is Cys residue protected with ACM protecting group
  VARIANT 28: note = Xaa is Cys residue protected with ACM protecting group
  VARIANT 29: note = Xaa is Cys residue protected with ACM protecting group
  VARIANT 32: note = Xaa is Cys residue protected with ACM protecting group
CLSKQEGXRLXAPLRKCREYYDQTAQMXXSKXC

SEQ ID NO: 1172 - protein, 33 aa, synthetic construct
  REGION 1..33: note = peptide sequence within human TNFR2 that represents epitope that TNFR2 agonist antibodies or fragments thereof can bind to
  VARIANT 5: note = Xaa is Cys residue protected with ACM protecting group
  VARIANT 13: note = Xaa is Cys residue protected with ACM protecting group
  VARIANT 16: note = Xaa is Cys residue protected with ACM protecting group
  VARIANT 25: note = Xaa is Cys residue protected with ACM protecting group
CGWYXALSKQEGXRLXCNASMDAVXTSTSPTRC

SEQ ID NO: 1173 - protein, 33 aa, synthetic construct
  REGION 1..33: note = peptide sequence within human TNFR2 that represents epitope that TNFR2 agonist antibodies or fragments thereof can bind to
  VARIANT 13: note = Xaa is Cys residue protected with ACM protecting group
  VARIANT 25: note = Xaa is Cys residue protected with ACM protecting group
CTFSNTTSSTDIXRPHCNASMDAVXTSTSPTRC

SEQ ID NO: 1174 - protein, 27 aa, synthetic construct
  REGION 1..27: note = peptide sequence within human TNFR2 that represents epitope that TNFR2 agonist antibodies or fragments thereof can bind to
  VARIANT 6: note = Xaa is Cys residue protected with ACM protecting group
SCGSRXSSDQVGGSGGTQACTREQNRI

SEQ ID NO: 1175 - protein, 27 aa, synthetic construct
  REGION 1..27: note = peptide sequence within human TNFR2 that represents epitope that TNFR2 agonist antibodies or fragments thereof can bind to
  VARIANT 6: note = Xaa is Cys residue protected with ACM protecting group
  VARIANT 18: note = Xaa is Cys residue protected with ACM protecting group
EGCRLXAPLRKGGSGGLXAPLRKCRPG

SEQ ID NO: 1176 - protein, 15 aa, synthetic construct
  REGION 1..15: note = peptide sequence within human TNFR2 that represents epitope that TNFR2 agonist antibodies or fragments thereof can bind to
TSSTDICRPHAACNV

SEQ ID NO: 1177 - protein, 33 aa, synthetic construct
  REGION 1..33: note = peptide sequence within human TNFR2 that represents epitope that TNFR2 agonist antibodies or fragments thereof can bind to
  VARIANT 23: note = Xaa is Cys residue protected with ACM protecting group
CRSQHTQPTPEPSTAPCAPLRKXRPGFGVARPC

SEQ ID NO: 1178 - protein, 33 aa, synthetic construct
  REGION 1..33: note = peptide sequence within human TNFR2 that represents epitope that TNFR2 agonist antibodies or fragments thereof can bind to
  VARIANT 9: note = Xaa is Cys residue protected with ACM protecting group
  VARIANT 20: note = Xaa is Cys residue protected with ACM protecting group
  VARIANT 28: note = Xaa is Cys residue protected with ACM protecting group
  VARIANT 30: note = Xaa is Cys residue protected with ACM protecting group
CDQVETQAXTREQNRICQAXTREQNRIXTXRPC

SEQ ID NO: 1179 - protein, 33 aa, synthetic construct
  REGION 1..33: note = peptide sequence within human TNFR2 that represents epitope that TNFR2 agonist antibodies or fragments thereof can bind to
  VARIANT 25: note = Xaa is Cys residue protected with ACM protecting group
CTSPTRSMAPGAVHLPCNASMDAVXTSTSPTRC

SEQ ID NO: 1180 - protein, 22 aa, synthetic construct
  REGION 1..22: note = peptide sequence within human TNFR2 that represents epitope that TNFR2 agonist antibodies or fragments thereof can bind to
  VARIANT 5: note = Xaa is Cys residue protected with ACM protecting group
CGSRXSSDQVETQACTREQNRI

SEQ ID NO: 1181 - protein, 27 aa, synthetic construct
  REGION 1..27: note = peptide sequence within human TNFR2 that represents epitope that TNFR2 agonist antibodies or fragments thereof can bind to
  VARIANT 20: note = Xaa is Cys residue protected with ACM protecting group
  VARIANT 23: note = Xaa is Cys residue protected with ACM protecting group
APEPGSTCRLRGGSGGQMCXSKXSPGQ

SEQ ID NO: 1182 - protein, 27 aa, synthetic construct
  REGION 1..27: note = peptide sequence within human TNFR2 that represents epitope that TNFR2 agonist antibodies or fragments thereof can bind to
  VARIANT 2: note = Xaa is Cys residue protected with ACM protecting group
  VARIANT 9: note = Xaa is Cys residue protected with ACM protecting group
  VARIANT 25: note = Xaa is Cys residue protected with ACM protecting group
  VARIANT 27: note = Xaa is Cys residue protected with ACM protecting group
EXLSCGSRXSSGGSGGCTREQNRIXTX

SEQ ID NO: 1183 - protein, 27 aa, synthetic construct
  REGION 1..27: note = peptide sequence within human TNFR2 that represents epitope that TNFR2 agonist antibodies or fragments thereof can bind to
ICNVVAIPGNAGGSGGDAVCTSTSPTR

SEQ ID NO: 1184 - protein, 15 aa, synthetic construct
  REGION 1..15: note = peptide sequence within human TNFR2 that represents epitope that TNFR2 agonist antibodies or fragments thereof can bind to
APSTSFLLPMAASPP

SEQ ID NO: 1185 - protein, 17 aa, synthetic construct
  REGION 1..17: note = peptide sequence within human TNFR2 that represents epitope that TNFR2 agonist antibodies or fragments thereof can bind to
CEQNRIATARPAAYAAC

SEQ ID NO: 1186 - protein, 18 aa, synthetic construct
  REGION 1..18: note = peptide sequence within human TNFR2 that represents epitope that TNFR2 agonist antibodies or fragments thereof can bind to
CQVAFTPYPGEPGSTARC

SEQ ID NO: 1187 - protein, 27 aa, synthetic construct
  REGION 1..27: note = peptide sequence within human TNFR2 that represents epitope that TNFR2 agonist antibodies or fragments thereof can bind to
RPHQICNVVAIGGSGGCTSTSPTRSMA

SEQ ID NO: 1188 - protein, 15 aa, synthetic construct
  REGION 1..15: note = peptide sequence within human TNFR2 that represents epitope that TNFR2 agonist antibodies or fragments thereof can bind to
TRSMAPGAVHLPQPV

SEQ ID NO: 1189 - protein, 27 aa, synthetic construct
  REGION 1..27: note = peptide sequence within human TNFR2 that represents epitope that TNFR2 agonist antibodies or fragments thereof can bind to
  VARIANT 5: note = Xaa is Cys residue protected with ACM protecting group
  VARIANT 25: note = Xaa is Cys residue protected with ACM protecting group
QNRIXTCRPGWGGSGGCALSKQEGXRL

SEQ ID NO: 1190 - protein, 27 aa, synthetic construct
  REGION 1..27: note = peptide sequence within TNFR2 that represents epitopes that TNFR2 agonist antibodies can bind to
  VARIANT 8: note = Xaa is Cys residue protected with ACM protecting group
  VARIANT 20: note = Xaa is Cys residue protected with ACM protecting group
ALSKQEGXRLCGGSGGCKPXAPGTFSN

SEQ ID NO: 1191 - protein, 33 aa, synthetic construct
  REGION 1..33: note = peptide sequence within human TNFR2 that represents epitope that TNFR2 agonist antibodies or fragments thereof can bind to
  VARIANT 15: note = Xaa is Cys residue protected with ACM protecting group
  VARIANT 23: note = Xaa is Cys residue protected with ACM protecting group
CGVARPGTETSDVVXKCAPLRKXRPGFGVARPC

SEQ ID NO: 1192 - protein, 27 aa, synthetic construct
  REGION 1..27: note = peptide sequence within human TNFR2 that represents epitope that TNFR2 agonist antibodies or fragments thereof can bind to
PCAPGTFSNTTGGSGGTSSTDICRPHQ

SEQ ID NO: 1193 - protein, 33 aa, synthetic construct
  REGION 1..33: note = peptide sequence within human TNFR2 that represents epitope that TNFR2 agonist antibodies or fragments thereof can bind to
  VARIANT 14: note = Xaa is Cys residue protected with ACM protecting group
  VARIANT 20: note = Xaa is Cys residue protected with ACM protecting group
  VARIANT 28: note = Xaa is Cys residue protected with ACM protecting group
  VARIANT 30: note = Xaa is Cys residue protected with ACM protecting group
CAFTPYAPEPGSTXRLCQAXTREQNRIXTXRPC

SEQ ID NO: 1194 - protein, 33 aa, synthetic construct
  REGION 1..33: note = peptide sequence within human TNFR2 that represents epitope that TNFR2 agonist antibodies or fragments thereof can bind to
  VARIANT 10: note = Xaa is Cys residue protected with ACM protecting group
  VARIANT 13: note = Xaa is Cys residue protected with ACM protecting group
  VARIANT 23: note = Xaa is Cys residue protected with ACM protecting group
CGTETSDVVXKPXAPGCAPLRKXRPGFGVARPC

SEQ ID NO: 1195 - protein, 185 aa, synthetic construct
  REGION 1..185: note = peptide derived from human TNFR2 with affinity for binding agonistic antibody MR2-1
YYDQTAQMCCSKCSPGQHAKVFCTKTSDTVCDSCEDSTYTQLWNWVPECLSCGSRCSSDQVETQACTREQNRICTCRPGWYCALSKQEGCRLCAPLRKCRPGFGVARPGTETSDVVCKPCAPGTFSNTTSSTDICRPHQICNVVAIPGNASMDAVCTSTSPTRSMAPGAVHLPQPVSTRSQHTQP

SEQ ID NO: 1196 - protein, 20 aa, synthetic construct
  REGION 1..20: note = peptide sequence within human TNFR2 that represents epitope that TNFR2 agonist antibodies and fragments thereof can bind to
QTAQMCCSKCSPGQHAKVFC

SEQ ID NO: 1197 - protein, 20 aa, synthetic construct
  REGION 1..20: note = peptide derived from human TNFR2 with affinity for binding agonistic antibody MR2-1
REQNRICTCRPGWYCALSKQ

SEQ ID NO: 1198 - protein, 20 aa, synthetic construct
  REGION 1..20: note = peptide derived from human TNFR2 with affinity for binding agonistic antibody MR2-1
CRPGWYCALSKQEGCRLCAP

SEQ ID NO: 1199 - protein, 20 aa, synthetic construct
  REGION 1..20: note = peptide derived from human TNFR2 with affinity for binding agonistic antibody MR2-1
LSKQEGCRLCAPLRKCRPGF

SEQ ID NO: 1200 - protein, 20 aa, synthetic construct
  REGION 1..20: note = peptide derived from human TNFR2 with affinity for binding agonistic antibody MR2-1
KQEGCRLCAPLRKCRPGFGV

SEQ ID NO: 1201 - protein, 5 aa, synthetic construct
  REGION 1..5: note = peptide sequence within human TNFR2 that represents epitope that TNFR2 agonist antibodies and fragments thereof can bind to
KCSPG

SEQ ID NO: 1202 - protein, 7 aa, synthetic construct
  REGION 1..7: note = human TNFR2 epitope to which agonist antibody MR2-1 binds
SSDQVET

SEQ ID NO: 1203 - protein, 28 aa, synthetic construct
  REGION 1..28: note = peptide sequence within human TNFR2 that represents epitope that TNFR2 agonist antibodies and fragments thereof can bind to
NRICTCRPGWYCALSKQEGCRLCAPLRK

SEQ ID NO: 1204 - protein, 40 aa, synthetic construct; identical to SEQ ID NO: 842
  REGION 1..40: note = human TNFR2 epitope to which agonist antibody MR2-1 binds

SEQ ID NO: 1205 - protein, 59 aa, synthetic construct; identical to SEQ ID NO: 841
  REGION 1..59: note = peptide sequence within human TNFR2 that represents epitope that TNFR2 agonist antibodies and fragments thereof can bind to

SEQ ID NO: 1206 - protein, 17 aa, synthetic construct
  REGION 1..17: note = epitope within human TNFR2 that may bind agonistic TNFR2 antibodies and fragments thereof
CGSRCSSDQVETQACTR

SEQ ID NO: 1207 - protein, 39 aa, synthetic construct
  REGION 1..39: note = epitope within human TNFR2 that may bind agonistic TNFR2 antibodies and fragments thereof
CTREQNRICTCRPGWYCALSKQEGCRLCAPLRKCRPSGF

SEQ ID NO: 1208 - protein, 50 aa, synthetic construct; identical to SEQ ID NO: 850
  REGION 1..50: note = epitope within human TNFR2 that may bind agonistic TNFR2 antibodies and fragments thereof

SEQ ID NO: 1209 - protein, 5 aa, synthetic construct
  REGION 1..5: note = epitope within human TNFR2 that may bind agonistic TNFR2 antibodies and fragments thereof
KCRPG

SEQ ID NO: 1210 - protein, 8 aa, synthetic construct
  REGION 1..8: note = epitope within human TNFR2 that may bind agonistic TNFR2 antibodies and fragments thereof
CAPLRKCR

SEQ ID NO: 1211 - protein, 8 aa, synthetic construct
  REGION 1..8: note = epitope within human TNFR2 that may bind agonistic TNFR2 antibodies and fragments thereof
KCRPGFGV

SEQ ID NO: 1212 - protein, 123 aa, synthetic construct
  REGION 1..123: note = TNFRAB1 (human TNFR2 antagonist antibody) heavy chain
  VARIANT 26..32: note = CDR-H1 = GFTFSSY
  VARIANT 52..57: note = CDR-H2 = SSGGSY
  VARIANT 99..112: note = CDR-H3 = QRVDGYSSYWYFDV
EVQLQESGGGLVKPGGSLKLSCAASGFTFSSYVMSWVRQTPEKRLEWVATISSGGSYTYYPDSVKGRFTISRDNAKNTLYLQMSSLRSEDTAMYYCARQRVDGYSSYWYFDVWGAGTAVTVSS

SEQ ID NO: 1213 - protein, 108 aa, synthetic construct
  REGION 1..108: note = TNFRAB1 (human TNFR2 antagonist antibody) light chain
  VARIANT 24..33: note = CDR-L1 = SASSSVYYMY
  VARIANT 49..55: note = CDR-L2 = STSNLAS
  VARIANT 88..96: note = CDR-L3 = QQRRNYPYT
DIVLTQSPAIMSASPGEKVTITCSASSSVYYMYWFQQKPGTSPKLWIYSTSNLASGVPVRFSGSGSGTSYSLTISRMEAEDAATYYCQQRRNYPYTFGGGTKLEIKRA

SEQ ID NO: 1214 - protein, 8 aa, synthetic construct
  REGION 1..8: note = TNFRAB2 (human TNFR2 antagonist antibody) heavy chain CDR-H1 variant 1
GYTFTDYL

SEQ ID NO: 1215 - protein, 8 aa, synthetic construct
  REGION 1..8: note = TNFRAB2 (human TNFR2 antagonist antibody) heavy chain CDR-H1 variant 2
GYTFTDYI

SEQ ID NO: 1216 - protein, 8 aa, synthetic construct
  REGION 1..8: note = TNFRAB2 (human TNFR2 antagonist antibody) heavy chain CDR-H2
VDPEYGST

SEQ ID NO: 1217 - protein, 14 aa, synthetic construct
  REGION 1..14: note = TNFRAB2 (human TNFR2 antagonist antibody) heavy chain CDR-H3
ARDDGSYSPFDYWG

SEQ ID NO: 1218 - protein, 6 aa, synthetic construct
  REGION 1..6: note = TNFRAB2 (human TNFR2 antagonist antibody) light chain CDR-L1
QNINKY

SEQ ID NO: 1219-1220 - skipped (2 entries)

SEQ ID NO: 1221 - protein, 9 aa, synthetic construct
  REGION 1..9: note = TNFRAB2 (human TNFR2 antagonist antibody) light chain CDR-L3 variant 1
CLQYVNLLT

SEQ ID NO: 1222 - protein, 9 aa, synthetic construct
  REGION 1..9: note = TNFRAB2 (human TNFR2 antagonist antibody) light chain CDR-L3 variant 2
CLQYVNLIT

SEQ ID NO: 1223 - protein, 14 aa, synthetic construct
  REGION 1..14: note = TNFR2A3 (human TNFR2 antagonist antibody) heavy chain CDR-H3
ARDDGSYSPFDYFG

SEQ ID NO: 1224 - protein, 8 aa, synthetic construct
  REGION 1..8: note = CDR-H2 of human TNFR2 antagonist antibody (or antigen-binding fragment thereof)
  VARIANT 6: note = Xaa is Gly or Ala
  VARIANT 7: note = Xaa is Asn, Gln, Ser, or Thr
VDPEYXXT

SEQ ID NO: 1225 - protein, 14 aa, synthetic construct
  REGION 1..14: note = CDR-H3 of human TNFR2 antagonist antibody (or antigen-binding fragment thereof)
  VARIANT 2: note = Xaa is Arg, Lys, or His
  VARIANT 4: note = Xaa is Asp or Glu
  VARIANT 5: note = Xaa is Gly or Ala
  VARIANT 7: note = Xaa is Asn, Gln, Ser, or Thr
  VARIANT 9: note = Xaa is Ala, Val, Leu, Ile, Pro, Met, Trp, Phe, or Tyr
  VARIANT 12: note = Xaa is Ala, Val, Leu, Ile, Pro, Met, Trp, Phe, or Tyr
  VARIANT 13: note = Xaa is Asp or Glu
  VARIANT 14: note = Xaa is Ala, Val, Leu, Ile, Pro, Met, Trp, Phe, or Tyr
QXVXXYXSXWYXXX

SEQ ID NO: 1226 - protein, 14 aa, synthetic construct
  REGION 1..14: note = CDR-H3 of human TNFR2 antagonist antibody (or antigen-binding fragment thereof)
  VARIANT 2: note = Xaa is Lys, Arg, or His
  VARIANT 4: note = Xaa is Asp or Glu
  VARIANT 5: note = Xaa is Gly or Ala
  VARIANT 6: note = Xaa is Asn, Gln, Ser, or Thr
  VARIANT 7: note = Xaa is Ala, Val, Leu, Ile, Pro, Met, Trp, Phe, or Tyr
  VARIANT 10: note = Xaa is Ala, Val, Leu, Ile, Pro, Met, Trp, Phe, or Tyr
  VARIANT 11: note = Xaa is Asp or Glu
  VARIANT 12: note = Xaa is Ala, Val, Leu, Ile, Pro, Met, Trp, Phe, or Tyr
AXDXXXXSPXXXWG

SEQ ID NO: 1227 - protein, 14 aa, synthetic construct
  REGION 1..14: note = CDR-H3 of human TNFR2 antagonist antibody (or antigen-binding fragment thereof)
  VARIANT 1: note = Xaa is any amino acid
  VARIANT 3: note = Xaa is any amino acid
  VARIANT 6: note = Xaa is any amino acid
  VARIANT 8: note = Xaa is any amino acid
  VARIANT 10: note = Xaa is any amino acid
  VARIANT 11: note = Xaa is any amino acid
  VARIANT 14: note = Xaa is any amino acid
XRXDGXSXYXXFDX

SEQ ID NO: 1228 - protein, 14 aa, synthetic construct
  REGION 1..14: note = CDR-H3 of human TNFR2 antagonist antibody (or antigen-binding fragment thereof)
  VARIANT 1: note = Xaa is any amino acid
  VARIANT 3: note = Xaa is any amino acid
  VARIANT 8: note = Xaa is any amino acid
  VARIANT 9: note = Xaa is any amino acid
  VARIANT 12: note = Xaa is any amino acid
  VARIANT 13: note = Xaa is any amino acid
  VARIANT 14: note = Xaa is any amino acid
XRXDGSYXXFDXXX

SEQ ID NO: 1229 - protein, 14 aa, synthetic construct
  REGION 1..14: note = CDR-H3 of human TNFR2 antagonist antibody (or antigen-binding fragment thereof)
QRVDGYSSYWYFDV

SEQ ID NO: 1230 - protein, 6 aa, synthetic construct
  REGION 1..6: note = CDR-H2 of human TNFR2 antagonist antibody (or antigen-binding fragment thereof)
SSGGSY

SEQ ID NO: 1231 - protein, 7 aa, synthetic construct
  REGION 1..7: note = CDR-H1 of human TNFR2 antagonist antibody (or antigen-binding fragment thereof)
GFTFSSY

SEQ ID NO: 1232 - protein, 8 aa, synthetic construct
  REGION 1..8: note = CDR-H1 of human TNFR2 antagonist antibody (or antigen-binding fragment thereof)
  VARIANT 2: note = Xaa is any amino acid
  VARIANT 5: note = Xaa is any amino acid
  VARIANT 6: note = Xaa is any amino acid
  VARIANT 8: note = Xaa is any amino acid
GXTFXXYX

SEQ ID NO: 1233 - protein, 8 aa, synthetic construct
  REGION 1..8: note = CDR-H1 of human TNFR2 antagonist antibody (or antigen-binding fragment thereof)
  VARIANT 8: note = Xaa is Leu or Ile
GYTFTDYX

SEQ ID NO: 1234 - protein, 6 aa, synthetic construct
  REGION 1..6: note = CDR-L1 of human TNFR2 antagonist antibody (or antigen-binding fragment thereof)
  VARIANT 6: note = Xaa is Ala, Val, Leu, Ile, Pro, Met, Trp, Phe, or Tyr
QNINKX

SEQ ID NO: 1235 - protein, 10 aa, synthetic construct
  REGION 1..10: note = CDR-L1 of human TNFR2 antagonist antibody (or antigen-binding fragment thereof)
SASSSVYYMY

SEQ ID NO: 1236 - protein, 15 aa, synthetic construct
  REGION 1..15: note = CDR-L1 of human TNFR2 antagonist antibody (or antigen-binding fragment thereof)
RASKSVSTSGYSYMH

SEQ ID NO: 1237 - protein, 7 aa, synthetic construct
  REGION 1..7: note = CDR-L2 of human TNFR2 antagonist antibody (or antigen-binding fragment thereof)
STSNLAS

SEQ ID NO: 1238 - protein, 7 aa, synthetic construct
  REGION 1..7: note = CDR-L2 of human TNFR2 antagonist antibody (or antigen-binding fragment thereof)
LASNLES

SEQ ID NO: 1239 - protein, 4 aa, synthetic construct
  REGION 1..4: note = framework region bound to the N-terminus of CDR-L2 of human TNFR2 antagonist antibody (or antigen-binding fragment thereof)
LLIR

SEQ ID NO: 1240 - skipped

SEQ ID NO: 1241 - protein, 9 aa, synthetic construct
  REGION 1..9: note = CDR-L3 of human TNFR2 antagonist antibody (or antigen-binding fragment thereof)
  VARIANT 4: note = Xaa is Ala, Val, Leu, Ile, Pro, Met, Trp, Phe, or Tyr
  VARIANT 8: note = Xaa is Leu or Ile
  VARIANT 9: note = Xaa is Asn, Gln, Ser, or Thr
CLQXVNLXX

SEQ ID NO: 1242 - protein, 9 aa, synthetic construct
  REGION 1..9: note = CDR-L3 of human TNFR2 antagonist antibody (or antigen-binding fragment thereof)
QQRRNYPYT

SEQ ID NO: 1243 - protein, 9 aa, synthetic construct
  REGION 1..9: note = CDR-L3 of human TNFR2 antagonist antibody (or antigen-binding fragment thereof)
  VARIANT 8: note = Xaa is Leu or Ile
CLQYVNLXT

SEQ ID NO: 1244 - protein, 9 aa, synthetic construct
  REGION 1..9: note = CDR-L3 of human TNFR2 antagonist antibody (or antigen-binding fragment thereof)
QHSRELPRT

SEQ ID NO: 1245 - protein, 120 aa, synthetic construct
  REGION 1..120: note = exemplary consensus sequence of a human antibody heavy chain variable domain
  VARIANT 26..35: note = CDR-H1 that can be replaced = GFTFSDYAMS
  VARIANT 50..66: note = CDR-H2 that can be replaced = VISENGSDTYYADSVKG
  VARIANT 99..110: note = CDR-H3 that can be replaced = DRGGAVSYFDVW
EVQLVESGGGLVQPGGSLRLSCAASGFTFSDYAMSWVRQAPGKGLEWVAVISENGSDTYYADSVKGRFTISRDDSKNTLYLQMNSLRAEDTAVYYCARDRGGAVSYFDVWGQGTLVTVSS

SEQ ID NO: 1246 - protein, 109 aa, synthetic construct
  REGION 1..109: note = exemplary consensus sequence of human antibody light chain variable domain
  VARIANT 24..35: note = CDR-L1 that can be replaced = RASQDVSSYLAW
  VARIANT 50..56: note = CDR-L2 that can be replaced = AASSLES
  VARIANT 89..97: note = CDR-L3 that can be replaced = QQYNSLPYT
DIQMTQSPSSLSASVGDRVTITCRASQDVSSYLAWYQQKPGKAPKLLIYAASSLESGVPSRFSGSGSGTDFTLTISSLQPEDFATYYCQQYNSLPYTFGQGTKVEIKRT

SEQ ID NO: 1247 - protein, 7 aa, synthetic construct
  REGION 1..7: note = Epitope within human TNFR2 that antagonistic antibodies or fragments thereof bind to
DSTYTQL

SEQ ID NO: 1248 - protein, 8 aa, synthetic construct
  REGION 1..8: note = Epitope within human TNFR2 that antagonistic antibodies or fragments thereof bind to
PECLSCGS

SEQ ID NO: 1249 - protein, 8 aa, synthetic construct
  REGION 1..8: note = Epitope within human TNFR2 that antagonistic antibodies or fragments thereof bind to
RICTCRPG

SEQ ID NO: 1250 - protein, 8 aa, synthetic construct
  REGION 1..8: note = Epitope within human TNFR2 that antagonistic antibodies or fragments thereof bind to
CAPLRKCR

SEQ ID NO: 1251 - protein, 54 aa, synthetic construct
  REGION 1..54: note = epitope within human TNFR2 to which antagonistic TNFR2 antibodies or fragments thereof can bind (at least 5 continuous or discontinuous residues)
CDSCEDSTYTQLWNWVPECLSCGSRCSSDQVETQACTREQNRICTCRPGWYCAL

SEQ ID NO: 1252 - protein, 16 aa, synthetic construct
  REGION 1..16: note = epitope within human TNFR2 to which antagonistic TNFR2 antibodies or fragments thereof can bind (at least 5 continuous or discontinuous residues)
CDSCEDSTYTQLWNWV

SEQ ID NO: 1253 - protein, 16 aa, synthetic construct
  REGION 1..16: note = epitope within human TNFR2 to which antagonistic TNFR2 antibodies or fragments thereof can bind (at least 5 continuous or discontinuous residues)
LWNWVPECLSCGSRCS

SEQ ID NO: 1254 - protein, 16 aa, synthetic construct
  REGION 1..16: note = epitope within human TNFR2 to which antagonistic TNFR2 antibodies or fragments thereof can bind (at least 5 continuous or discontinuous residues)
TREQNRICTCRPGWYC

SEQ ID NO: 1255 - protein, 16 aa, synthetic construct
  REGION 1..16: note = epitope within human TNFR2 to which antagonistic TNFR2 antibodies or fragments thereof can bind (at least 5 continuous or discontinuous residues)
KQEGCRLCAPLRKCRP

SEQ ID NO: 1256 - protein, 5 aa, synthetic construct
  REGION 1..5: note = epitope within human TNFR2 to which antagonistic TNFR2 antibodies or fragments thereof bind
KCRPG

SEQ ID NO: 1257 - protein, 8 aa, synthetic construct
  REGION 1..8: note = epitope within human TNFR2 to which antagonistic antibodies or fragments thereof bind
KCRPGFGV

SEQ ID NO: 1258 - protein, 9 aa, synthetic construct
  REGION 1..9: note = epitope within human TNFR2 to which antagonistic antibodies (such as TNFRAB1) or fragments thereof bind
CKPCAPGTF

SEQ ID NO: 1259 - protein, 41 aa, synthetic construct
  REGION 1..41: note = epitope within human TNFR2 to which antagonistic TNFR2 antibodies or fragments thereof can bind (at least 5 continuous or discontinuous residues)
ARPGTETSDVVCKPCAPGTFSNTTSSTDICRPHQICNVVAI

SEQ ID NO: 1260 - protein, 27 aa, synthetic construct
  REGION 1..27: note = epitope within human TNFR2 to which antagonistic antibodies or fragments thereof bind
  VARIANT 3: note = Xaa is Cys residue protected with ACM protecting group
  VARIANT 6: note = Xaa is Cys residue protected with ACM protecting group
  VARIANT 22: note = Xaa is Cys residue protected with ACM protecting group
PEXLSXGSRCSGGSGGNRICTXRPGWY

SEQ ID NO: 1261 - protein, 27 aa, synthetic construct
  REGION 1..27: note = epitope within human TNFR2 to which antagonistic antibodies or fragments thereof bind
  VARIANT 1: note = Xaa is Cys residue protected with ACM protecting group
  VARIANT 4: note = Xaa is Cys residue protected with ACM protecting group
  VARIANT 22: note = Xaa is Cys residue protected with ACM protecting group
XLSXGSRCSSDGGSGGNRICTXRPGWY

SEQ ID NO: 1262 - protein, 27 aa, synthetic construct
  REGION 1..27: note = epitope within human TNFR2 to which antagonistic antibodies or fragments thereof bind
  VARIANT 4: note = Xaa is Cys residue protected with ACM protecting group
  VARIANT 7: note = Xaa is Cys residue protected with ACM protecting group
  VARIANT 22: note = Xaa is Cys residue protected with ACM protecting group
VPEXLSXGSRCGGSGGNRICTXRPGWY

SEQ ID NO: 1263 - protein, 27 aa, synthetic construct
  REGION 1..27: note = epitope within human TNFR2 to which antagonistic antibodies or fragments thereof bind
  VARIANT 3: note = Xaa is Cys residue protected with ACM protecting group
  VARIANT 22: note = Xaa is Cys residue protected with ACM protecting group
LSXGSRCSSDQGGSGGNRICTXRPGWY

SEQ ID NO: 1264 - protein, 27 aa, synthetic construct
  REGION 1..27: note = epitope within human TNFR2 to which antagonistic antibodies or fragments thereof bind
  VARIANT 3: note = Xaa is Cys residue protected with ACM protecting group
  VARIANT 6: note = Xaa is Cys residue protected with ACM protecting group
  VARIANT 19: note = Xaa is Cys residue protected with ACM protecting group
  VARIANT 25: note = Xaa is Cys residue protected with ACM protecting group
PEXLSXGSRCSGGSGGCTXRPGWYXAL

SEQ ID NO: 1265 - protein, 27 aa, synthetic construct
  REGION 1..27: note = epitope within human TNFR2 to which antagonistic antibodies or fragments thereof bind
  VARIANT 2: note = Xaa is Cys residue protected with ACM protecting group
  VARIANT 22: note = Xaa is Cys residue protected with ACM protecting group
SXGSRCSSDQVGGSGGNRICTXRPGWY

SEQ ID NO: 1266 - protein, 27 aa, synthetic construct
  REGION 1..27: note = epitope within human TNFR2 to which antagonistic antibodies or fragments thereof bind
  VARIANT 1: note = Xaa is Cys residue protected with ACM protecting group
  VARIANT 21: note = Xaa is Cys residue protected with ACM protecting group
  VARIANT 27: note = Xaa is Cys residue protected with ACM protecting group
XGSRCSSDQVEGGSGGRICTXRPGWYX

SEQ ID NO: 1267 - protein, 27 aa, synthetic construct
  REGION 1..27: note = epitope within human TNFR2 to which antagonistic antibodies or fragments thereof bind
  VARIANT 2: note = Xaa is Cys residue protected with ACM protecting group
  VARIANT 5: note = Xaa is Cys residue protected with ACM protecting group
  VARIANT 19: note = Xaa is Cys residue protected with ACM protecting group
  VARIANT 25: note = Xaa is Cys residue protected with ACM protecting group
EXLSXGSRCSSGGSGGCTXRPGWYXAL

SEQ ID NO: 1268 - protein, 27 aa, synthetic construct
  REGION 1..27: note = epitope within human TNFR2 to which antagonistic antibodies or fragments thereof bind
  VARIANT 6: note = Xaa is Cys residue protected with ACM protecting group
  VARIANT 17: note = Xaa is Cys residue protected with ACM protecting group
EGCRLXAPLRKGGSGGXAPLRKCRPGF

SEQ ID NO: 1269 - protein, 27 aa, synthetic construct
  REGION 1..27: note = epitope within human TNFR2 to which antagonistic antibodies or fragments thereof bind
  VARIANT 1: note = Xaa is Cys residue protected with ACM protecting group
  VARIANT 4: note = Xaa is Cys residue protected with ACM protecting group
  VARIANT 19: note = Xaa is Cys residue protected with ACM protecting group
  VARIANT 25: note = Xaa is Cys residue protected with ACM protecting group
XLSXGSRCSSDGGSGGCTXRPGWYXAL

SEQ ID NO: 1270 - protein, 27 aa, synthetic construct
  REGION 1..27: note = epitope within human TNFR2 to which antagonistic antibodies or fragments thereof bind
  VARIANT 11: note = Xaa is Cys residue protected with ACM protecting group
  VARIANT 21: note = Xaa is Cys residue protected with ACM protecting group
  VARIANT 27: note = Xaa is Cys residue protected with ACM protecting group
CSSDQVETQAXGGSGGRICTXRPGWYX

SEQ ID NO: 1271 - protein, 27 aa, synthetic construct
  REGION 1..27: note = epitope within human TNFR2 to which antagonistic antibodies or fragments thereof bind
  VARIANT 21: note = Xaa is Cys residue protected with ACM protecting group
  VARIANT 27: note = Xaa is Cys residue protected with ACM protecting group
GSRCSSDQVETGGSGGRICTXRPGWYX

SEQ ID NO: 1272 - protein, 27 aa, synthetic construct
  REGION 1..27: note = epitope within human TNFR2 to which antagonistic antibodies or fragments thereof bind
  VARIANT 1: note = Xaa is Cys residue protected with ACM protecting group
  VARIANT 22: note = Xaa is Cys residue protected with ACM protecting group
XGSRCSSDQVEGGSGGNRICTXRPGWY

SEQ ID NO: 1273 - protein, 27 aa, synthetic construct
  REGION 1..27: note = epitope within human TNFR2 to which antagonistic antibodies or fragments thereof bind
  VARIANT 22: note = Xaa is Cys residue protected with ACM protecting group
GSRCSSDQVETGGSGGNRICTXRPGWY

SEQ ID NO: 1274 - protein, 27 aa, synthetic construct
  REGION 1..27: note = epitope within human TNFR2 to which antagonistic antibodies or fragments thereof bind
  VARIANT 3: note = Xaa is Cys residue protected with ACM protecting group
  VARIANT 6: note = Xaa is Cys residue protected with ACM protecting group
  VARIANT 21: note = Xaa is Cys residue protected with ACM protecting group
  VARIANT 27: note = Xaa is Cys residue protected with ACM protecting group
PEXLSXGSRCSGGSGGRICTXRPGWYX

SEQ ID NO: 1275 - protein, 27 aa, synthetic construct
  REGION 1..27: note = epitope within human TNFR2 to which antagonistic antibodies or fragments thereof bind
  VARIANT 4: note = Xaa is Cys residue protected with ACM protecting group
  VARIANT 7: note = Xaa is Cys residue protected with ACM protecting group
  VARIANT 23: note = Xaa is Cys residue protected with ACM protecting group
VPEXLSXGSRCGGSGGQNRICTXRPGW

SEQ ID NO: 1276 - protein, 27 aa, synthetic construct
  REGION 1..27: note = epitope within human TNFR2 to which antagonistic antibodies or fragments thereof bind
  VARIANT 7: note = Xaa is Cys residue protected with ACM protecting group
  VARIANT 17: note = Xaa is Cys residue protected with ACM protecting group
QEGCRLXAPLRGGSGGXAPLRKCRPGF

SEQ ID NO: 1277 - protein, 27 aa, synthetic construct
  REGION 1..27: note = epitope within human TNFR2 to which antagonistic antibodies or fragments thereof bind
  VARIANT 21: note = Xaa is Cys residue protected with ACM protecting group
  VARIANT 27: note = Xaa is Cys residue protected with ACM protecting group
SRCSSDQVETQGGSGGRICTXRPGWYX

SEQ ID NO: 1278 - protein, 27 aa, synthetic construct
  REGION 1..27: note = epitope within human TNFR2 to which antagonistic antibodies or fragments thereof bind
  VARIANT 11: note = Xaa is Cys residue protected with ACM protecting group
  VARIANT 17: note = Xaa is Cys residue protected with ACM protecting group
ALSKQEGCRLXGGSGGXAPLRKCRPGF

SEQ ID NO: 1279 - protein, 27 aa, synthetic construct
  REGION 1..27: note = epitope within human TNFR2 to which antagonistic antibodies or fragments thereof bind
  VARIANT 7: note = Xaa is Cys residue protected with ACM protecting group
QEGCRLXAPLRGGSGGPLRKCRPGFGV

SEQ ID NO: 1280 - protein, 27 aa, synthetic construct
  REGION 1..27: note = epitope within human TNFR2 to which antagonistic antibodies or fragments thereof bind
  VARIANT 2: note = Xaa is Cys residue protected with ACM protecting group
YXALSKQEGCRGGSGGAPLRKCRPGFG

SEQ ID NO: 1281 - protein, 27 aa, synthetic construct
  REGION 1..27: note = epitope within human TNFR2 to which antagonistic antibodies or fragments thereof bind
  VARIANT 3: note = Xaa is Cys residue protected with ACM protecting group
  VARIANT 21: note = Xaa is Cys residue protected with ACM protecting group
  VARIANT 27: note = Xaa is Cys residue protected with ACM protecting group
LSXGSRCSSDQGGSGGRICTXRPGWYX

SEQ ID NO: 1282 - protein, 27 aa, synthetic construct
  REGION 1..27: note = epitope within human TNFR2 to which antagonistic antibodies or fragments thereof bind
  VARIANT 3: note = Xaa is Cys residue protected with ACM protecting group
  VARIANT 6: note = Xaa is Cys residue protected with ACM protecting group
  VARIANT 23: note = Xaa is Cys residue protected with ACM protecting group
PEXLSXGSRCSGGSGGQNRICTXRPGW

SEQ ID NO: 1283 - protein, 27 aa, synthetic construct
  REGION 1..27: note = epitope within human TNFR2 to which antagonistic antibodies or fragments thereof bind
  VARIANT 21: note = Xaa is Cys residue protected with ACM protecting group
  VARIANT 27: note = Xaa is Cys residue protected with ACM protecting group
RCSSDQVETQAGGSGGRICTXRPGWYX

SEQ ID NO: 1284 - protein, 27 aa, synthetic construct
  REGION 1..27: note = epitope within human TNFR2 to which antagonistic antibodies or fragments thereof bind
  VARIANT 3: note = Xaa is Cys residue protected with ACM protecting group
  VARIANT 6: note = Xaa is Cys residue protected with ACM protecting group
  VARIANT 20: note = Xaa is Cys residue protected with ACM protecting group
  VARIANT 26: note = Xaa is Cys residue protected with ACM protecting group
PEXLSXGSRCSGGSGGICTXRPGWYXA

SEQ ID NO: 1285 - protein, 27 aa, synthetic construct
  REGION 1..27: note = epitope within human TNFR2 to which antagonistic antibodies or fragments thereof bind
  VARIANT 4: note = Xaa is Cys residue protected with ACM protecting group
  VARIANT 7: note = Xaa is Cys residue protected with ACM protecting group
  VARIANT 20: note = Xaa is Cys residue protected with ACM protecting group
  VARIANT 26: note = Xaa is Cys residue protected with ACM protecting group
VPEXLSXGSRCGGSGGICTXRPGWYXA

SEQ ID NO: 1286 - protein, 27 aa, synthetic construct
  REGION 1..27: note = epitope within human TNFR2 to which antagonistic antibodies or fragments thereof bind
  VARIANT 2: note = Xaa is Cys residue protected with ACM protecting group
  VARIANT 19: note = Xaa is Cys residue protected with ACM protecting group
  VARIANT 25: note = Xaa is Cys residue protected with ACM protecting group
SXGSRCSSDQVGGSGGCTXRPGWYXAL

SEQ ID NO: 1287 - protein, 27 aa, synthetic construct
  REGION 1..27: note = epitope within human TNFR2 to which antagonistic antibodies or fragments thereof bind
  VARIANT 3: note = Xaa is Cys residue protected with ACM protecting group
WYXALSKQEGCGGSGGAPLRKCRPGFG

SEQ ID NO: 1288 - protein, 27 aa, synthetic construct
  REGION 1..27: note = epitope within human TNFR2 to which antagonistic antibodies or fragments thereof bind
  VARIANT 10: note = Xaa is Cys residue protected with ACM protecting group
  VARIANT 17: note = Xaa is Cys residue protected with ACM protecting group
LSKQEGCRLXAGGSGGXAPLRKCRPGF

SEQ ID NO: 1289 - protein, 27 aa, synthetic construct
  REGION 1..27: note = epitope within human TNFR2 to which antagonistic antibodies or fragments thereof bind
  VARIANT 8: note = Xaa is Cys residue protected with ACM protecting group
  VARIANT 17: note = Xaa is Cys residue protected with ACM protecting group
KQEGCRLXAPLGGSGGXAPLRKCRPGF

SEQ ID NO: 1290 - protein, 27 aa, synthetic construct
  REGION 1..27: note = epitope within human TNFR2 to which antagonistic antibodies or fragments thereof bind
  VARIANT 3: note = Xaa is Cys residue protected with ACM protecting group
  VARIANT 19: note = Xaa is Cys residue protected with ACM protecting group
  VARIANT 25: note = Xaa is Cys residue protected with ACM protecting group
LSXGSRCSSDQGGSGGCTXRPGWYXAL

SEQ ID NO: 1291 - protein, 27 aa, synthetic construct
  REGION 1..27: note = epitope within human TNFR2 to which antagonistic antibodies or fragments thereof bind
  VARIANT 23: note = Xaa is Cys residue protected with ACM protecting group
RCSSDQVETQAGGSGGQNRICTXRPGW

SEQ ID NO: 1292 - protein, 27 aa, synthetic construct
  REGION 1..27: note = epitope within human TNFR2 to which antagonistic antibodies or fragments thereof bind
  VARIANT 9: note = Xaa is Cys residue protected with ACM protecting group
  VARIANT 17: note = Xaa is Cys residue protected with ACM protecting group
SKQEGCRLXAPGGSGGXAPLRKCRPGF

SEQ ID NO: 1293 - protein, 27 aa, synthetic construct
  REGION 1..27: note = epitope within human TNFR2 to which antagonistic antibodies or fragments thereof bind
  VARIANT 1: note = Xaa is Cys residue protected with ACM protecting group
  VARIANT 23: note = Xaa is Cys residue protected with ACM protecting group
XGSRCSSDQVEGGSGGQNRICTXRPGW

SEQ ID NO: 1294 - protein, 27 aa, synthetic construct
  REGION 1..27: note = epitope within human TNFR2 to which antagonistic antibodies or fragments thereof bind
  VARIANT 11: note = Xaa is Cys residue protected with ACM protecting group
  VARIANT 23: note = Xaa is Cys residue protected with ACM protecting group
CSSDQVETQAXGGSGGQNRICTXRPGW

SEQ ID NO: 1295 - protein, 27 aa, synthetic construct
  REGION 1..27: note = epitope within human TNFR2 to which antagonistic antibodies or fragments thereof bind
  VARIANT 11: note = Xaa is Cys residue protected with ACM protecting group
  VARIANT 23: note = Xaa is Cys residue protected with ACM protecting group
CSSDQVETQAXGGSGGQNRICTXRPGW

SEQ ID NO: 1296 - protein, 27 aa, synthetic construct
  REGION 1..27: note = epitope within human TNFR2 to which antagonistic antibodies or fragments thereof bind
  VARIANT 4: note = Xaa is Cys residue protected with ACM protecting group
  VARIANT 7: note = Xaa is Cys residue protected with ACM protecting group
  VARIANT 19: note = Xaa is Cys residue protected with ACM protecting group
  VARIANT 25: note = Xaa is Cys residue protected with ACM protecting group
VPEXLSXGSRCGGSGGCTXRPGWYXAL

SEQ ID NO: 1297 - protein, 27 aa, synthetic construct
  REGION 1..27: note = epitope within human TNFR2 to which antagonistic antibodies or fragments thereof bind
  VARIANT 2: note = Xaa is Cys residue protected with ACM protecting group
  VARIANT 5: note = Xaa is Cys residue protected with ACM protecting group
  VARIANT 23: note = Xaa is Cys residue protected with ACM protecting group
EXLSXGSRCSSGGSGGQNRICTXRPGW

SEQ ID NO: 1298 - protein, 27 aa, synthetic construct
  REGION 1..27: note = epitope within human TNFR2 to which antagonistic antibodies or fragments thereof bind
  VARIANT 22: note = Xaa is Cys residue protected with ACM protecting group
SRCSSDQVETQGGSGGNRICTXRPGWY

SEQ ID NO: 1299 - protein, 27 aa, synthetic construct
  REGION 1..27: note = epitope within human TNFR2 to which antagonistic antibodies or fragments thereof bind
  VARIANT 1: note = Xaa is Cys residue protected with ACM protecting group
  VARIANT 19: note = Xaa is Cys residue protected with ACM protecting group
  VARIANT 25: note = Xaa is Cys residue protected with ACM protecting group
XGSRCSSDQVEGGSGGCTXRPGWYXAL

SEQ ID NO: 1300 - protein, 27 aa, synthetic construct
  REGION 1..27: note = epitope within human TNFR2 to which antagonistic antibodies or fragments thereof bind
  VARIANT 4: note = Xaa is Cys residue protected with ACM protecting group
  VARIANT 7: note = Xaa is Cys residue protected with ACM protecting group
  VARIANT 21: note = Xaa is Cys residue protected with ACM protecting group
  VARIANT 27: note = Xaa is Cys residue protected with ACM protecting group
VPEXLSXGSRCGGSGGRICTXRPGWYX

SEQ ID NO: 1301 - protein, 27 aa, synthetic construct
  REGION 1..27: note = epitope within human TNFR2 to which antagonistic antibodies or fragments thereof bind
  VARIANT 2: note = Xaa is Cys residue protected with ACM protecting group
  VARIANT 5: note = Xaa is Cys residue protected with ACM protecting group
  VARIANT 21: note = Xaa is Cys residue protected with ACM protecting group
  VARIANT 27: note = Xaa is Cys residue protected with ACM protecting group
EXLSXGSRCSSGGSGGRICTXRPGWYX

SEQ ID NO: 1302 - protein, 27 aa, synthetic construct
  REGION 1..27: note = epitope within human TNFR2 to which antagonistic antibodies or fragments thereof bind
  VARIANT 10: note = Xaa is Cys residue protected with ACM protecting group
LSKQEGCRLXAGGSGGRKCRPGFGVAR

SEQ ID NO: 1303 - protein, 27 aa, synthetic construct
  REGION 1..27: note = epitope within human TNFR2 to which antagonistic antibodies or fragments thereof bind
  VARIANT 23: note = Xaa is Cys residue protected with ACM protecting group
GSRCSSDQVETGGSGGQNRICTXRPGW

SEQ ID NO: 1304 - protein, 27 aa, synthetic construct
  REGION 1..27: note = epitope within human TNFR2 to which antagonistic antibodies or fragments thereof bind
  VARIANT 2: note = Xaa is Cys residue protected with ACM protecting group
  VARIANT 21: note = Xaa is Cys residue protected with ACM protecting group
  VARIANT 27: note = Xaa is Cys residue protected with ACM protecting group
SXGSRCSSDQVGGSGGRICTXRPGWYX

SEQ ID NO: 1305 - protein, 27 aa, synthetic construct
  REGION 1..27: note = epitope within human TNFR2 to which antagonistic antibodies or fragments thereof bind
  VARIANT 19: note = Xaa is Cys residue protected with ACM protecting group
  VARIANT 25: note = Xaa is Cys residue protected with ACM protecting group
GSRCSSDQVETGGSGGCTXRPGWYXAL

SEQ ID NO: 1306 - protein, 27 aa, synthetic construct
  REGION 1..27: note = epitope within human TNFR2 to which antagonistic antibodies or fragments thereof bind
  VARIANT 2: note = Xaa is Cys residue protected with ACM protecting group
YXALSKQEGCRGGSGGRKCRPGFGVAR

SEQ ID NO: 1307 - protein, 27 aa, synthetic construct
  REGION 1..27: note = epitope within human TNFR2 to which antagonistic antibodies or fragments thereof bind
  VARIANT 8: note = Xaa is Cys residue protected with ACM protecting group
KQEGCRLXAPLGGSGGPLRKCRPGFGV

SEQ ID NO: 1308 - protein, 27 aa, synthetic construct
  REGION 1..27: note = epitope within human TNFR2 to which antagonistic antibodies or fragments thereof bind
  VARIANT 11: note = Xaa is Cys residue protected with ACM protecting group
ALSKQEGCRLXGGSGGRKCRPGFGVAR

SEQ ID NO: 1309 - protein, 27 aa, synthetic construct
  REGION 1..27: note = epitope within human TNFR2 to which antagonistic antibodies or fragments thereof bind
  VARIANT 2: note = Xaa is Cys residue protected with ACM protecting group
  VARIANT 5: note = Xaa is Cys residue protected with ACM protecting group
  VARIANT 20: note = Xaa is Cys residue protected with ACM protecting group
  VARIANT 26: note = Xaa is Cys residue protected with ACM protecting group
EXLSXGSRCSSGGSGGICTXRPGWYXA

SEQ ID NO: 1310 - protein, 27 aa, synthetic construct
  REGION 1..27: note = epitope within human TNFR2 to which antagonistic antibodies or fragments thereof bind
  VARIANT 11: note = Xaa is Cys residue protected with ACM protecting group
  VARIANT 20: note = Xaa is Cys residue protected with ACM protecting group
  VARIANT 26: note = Xaa is Cys residue protected with ACM protecting group
CSSDQVETQAXGGSGGICTXRPGWYXA

SEQ ID NO: 1311 - protein, 27 aa, synthetic construct
  REGION 1..27: note = epitope within human TNFR2 to which antagonistic antibodies or fragments thereof bind
  VARIANT 6: note = Xaa is Cys residue protected with ACM protecting group
EGCRLXAPLRKGGSGGPLRKCRPGFGV

SEQ ID NO: 1312 - protein, 27 aa, synthetic construct
  REGION 1..27: note = epitope within human TNFR2 to which antagonistic antibodies or fragments thereof bind
  VARIANT 11: note = Xaa is Cys residue protected with ACM protecting group
ALSKQEGCRLXGGSGGPLRKCRPGFGV

SEQ ID NO: 1313 - protein, 27 aa, synthetic construct
  REGION 1..27: note = epitope within human TNFR2 to which antagonistic antibodies or fragments thereof bind
  VARIANT 1: note = Xaa is Cys residue protected with ACM protecting group
XALSKQEGCRLGGSGGRKCRPGFGVAR

SEQ ID NO: 1314 - protein, 27 aa, synthetic construct
  REGION 1..27: note = epitope within human TNFR2 to which antagonistic antibodies or fragments thereof bind
  VARIANT 1: note = Xaa is Cys residue protected with ACM protecting group
  VARIANT 17: note = Xaa is Cys residue protected with ACM protecting group
XALSKQEGCRLGGSGGXAPLRKCRPGF

SEQ ID NO: 1315 - protein, 27 aa, synthetic construct
  REGION 1..27: note = epitope within human TNFR2 to which antagonistic antibodies or fragments thereof bind
  VARIANT 1: note = Xaa is Cys residue protected with ACM protecting group
  VARIANT 4: note = Xaa is Cys residue protected with ACM protecting group
  VARIANT 21: note = Xaa is Cys residue protected with ACM protecting group
  VARIANT 27: note = Xaa is Cys residue protected with ACM protecting group
XLSXGSRCSSDGGSGGRICTXRPGWYX

SEQ ID NO: 1316 - protein, 27 aa, synthetic construct
  REGION 1..27: note = epitope within human TNFR2 to which antagonistic antibodies or fragments thereof bind
  VARIANT 10: note = Xaa is Cys residue protected with ACM protecting group
LSKQEGCRLXAGGSGGPLRKCRPGFGV

SEQ ID NO: 1317 - protein, 27 aa, synthetic construct
  REGION 1..27: note = epitope within human TNFR2 to which antagonistic antibodies or fragments thereof bind
  VARIANT 9: note = Xaa is Cys residue protected with ACM protecting group
SKQEGCRLXAPGGSGGRKCRPGFGVAR

SEQ ID NO: 1318 - protein, 27 aa, synthetic construct
  REGION 1..27: note = epitope within human TNFR2 to which antagonistic antibodies or fragments thereof bind
  VARIANT 8: note = Xaa is Cys residue protected with ACM protecting group
KQEGCRLXAPLGGSGGRKCRPGFGVAR

SEQ ID NO: 1319 - protein, 27 aa, synthetic construct
  REGION 1..27: note = epitope within human TNFR2 to which antagonistic antibodies or fragments thereof bind
  VARIANT 7: note = Xaa is Cys residue protected with ACM protecting group
QEGCRLXAPLRGGSGGRKCRPGFGVAR

SEQ ID NO: 1320 - protein, 27 aa, synthetic construct
  REGION 1..27: note = epitope within human TNFR2 to which antagonistic antibodies or fragments thereof bind
  VARIANT 1: note = Xaa is Cys residue protected with ACM protecting group
XALSKQEGCRLGGSGGAPLRKCRPGFG

SEQ ID NO: 1321 - protein, 27 aa, synthetic construct
  REGION 1..27: note = epitope within human TNFR2 to which antagonistic antibodies or fragments thereof bind
  VARIANT 1: note = Xaa is Cys residue protected with ACM protecting group
XALSKQEGCRLGGSGGPLRKCRPGFGV

SEQ ID NO: 1322 - protein, 27 aa, synthetic construct
  REGION 1..27: note = epitope within human TNFR2 to which antagonistic antibodies or fragments thereof bind
  VARIANT 20: note = Xaa is Cys residue protected with ACM protecting group
  VARIANT 26: note = Xaa is Cys residue protected with ACM protecting group
GSRCSSDQVETGGSGGICTXRPGWYXA

SEQ ID NO: 1323 - protein, 27 aa, synthetic construct
  REGION 1..27: note = epitope within human TNFR2 to which antagonistic antibodies or fragments thereof bind
  VARIANT 23: note = Xaa is Cys residue protected with ACM protecting group
SRCSSDQVETQGGSGGQNRICTXRPGW

SEQ ID NO: 1324 - protein, 27 aa, synthetic construct
  REGION 1..27: note = epitope within human TNFR2 to which antagonistic antibodies or fragments thereof bind
  VARIANT 1: note = Xaa is Cys residue protected with ACM protecting group
  VARIANT 20: note = Xaa is Cys residue protected with ACM protecting group
  VARIANT 26: note = Xaa is Cys residue protected with ACM protecting group
XGSRCSSDQVEGGSGGICTXRPGWYXA

SEQ ID NO: 1325 - protein, 27 aa, synthetic construct
  REGION 1..27: note = epitope within human TNFR2 to which antagonistic antibodies or fragments thereof bind
  VARIANT 2: note = Xaa is Cys residue protected with ACM protecting group
  VARIANT 5: note = Xaa is Cys residue protected with ACM protecting group
  VARIANT 22: note = Xaa is Cys residue protected with ACM protecting group
EXLSXGSRCSSGGSGGNRICTXRPGWY

SEQ ID NO: 1326 - protein, 27 aa, synthetic construct
  REGION 1..27: note = epitope within human TNFR2 to which antagonistic antibodies or fragments thereof bind
  VARIANT 20: note = Xaa is Cys residue protected with ACM protecting group
  VARIANT 26: note = Xaa is Cys residue protected with ACM protecting group
SRCSSDQVETQGGSGGICTXRPGWYXA

SEQ ID NO: 1327 - protein, 27 aa, synthetic construct
  REGION 1..27: note = epitope within human TNFR2 to which antagonistic antibodies or fragments thereof bind
  VARIANT 2: note = Xaa is Cys residue protected with ACM protecting group
YXALSKQEGCRGGSGGPLRKCRPGFGV

SEQ ID NO: 1328 - protein, 27 aa, synthetic construct
  REGION 1..27: note = epitope within human TNFR2 to which antagonistic antibodies or fragments thereof bind
  VARIANT 20: note = Xaa is Cys residue protected with ACM protecting group
  VARIANT 26: note = Xaa is Cys residue protected with ACM protecting group
RCSSDQVETQAGGSGGICTXRPGWYXA

SEQ ID NO: 1329 - protein, 27 aa, synthetic construct
  REGION 1..27: note = epitope within human TNFR2 to which antagonistic antibodies or fragments thereof bind
  VARIANT 9: note = Xaa is Cys residue protected with ACM protecting group
SKQEGCRLXAPGGSGGPLRKCRPGFGV

SEQ ID NO: 1330 - protein, 27 aa, synthetic construct
  REGION 1..27: note = epitope within human TNFR2 to which antagonistic antibodies or fragments thereof bind
  VARIANT 2: note = Xaa is Cys residue protected with ACM protecting group
  VARIANT 23: note = Xaa is Cys residue protected with ACM protecting group
SXGSRCSSDQVGGSGGQNRICTXRPGW

SEQ ID NO: 1331 - protein, 27 aa, synthetic construct
  REGION 1..27: note = epitope within human TNFR2 to which antagonistic antibodies or fragments thereof bind
  VARIANT 6: note = Xaa is Cys residue protected with ACM protecting group
EGCRLXAPLRKGGSGGRKCRPGFGVAR

SEQ ID NO: 1332 - protein, 27 aa, synthetic construct
  REGION 1..27: note = epitope within human TNFR2 to which antagonistic antibodies or fragments thereof bind
  VARIANT 1: note = Xaa is Cys residue protected with ACM protecting group
  VARIANT 4: note = Xaa is Cys residue protected with ACM protecting group
  VARIANT 23: note = Xaa is Cys residue protected with ACM protecting group
XLSXGSRCSSDGGSGGQNRICTXRPGW

SEQ ID NO: 1333 - protein, 27 aa, synthetic construct
  REGION 1..27: note = epitope within human TNFR2 to which antagonistic antibodies or fragments thereof bind
  VARIANT 3: note = Xaa is Cys residue protected with ACM protecting group
WYXALSKQEGCGGSGGPLRKCRPGFGV

SEQ ID NO: 1334 - protein, 27 aa, synthetic construct
  REGION 1..27: note = epitope within human TNFR2 to which antagonistic antibodies or fragments thereof bind
  VARIANT 7: note = Xaa is Cys residue protected with ACM protecting group
QEGCRLXAPLRGGSGGAPLRKCRPGFG

SEQ ID NO: 1335 - protein, 27 aa, synthetic construct
  REGION 1..27: note = epitope within human TNFR2 to which antagonistic antibodies or fragments thereof bind
  VARIANT 3: note = Xaa is Cys residue protected with ACM protecting group
  VARIANT 17: note = Xaa is Cys residue protected with ACM protecting group
WYXALSKQEGCGGSGGXAPLRKCRPGF

SEQ ID NO: 1336 - protein, 27 aa, synthetic construct
  REGION 1..27: note = epitope within human TNFR2 to which antagonistic antibodies or fragments thereof bind
  VARIANT 11: note = Xaa is Cys residue protected with ACM protecting group
ALSKQEGCRLXGGSGGAPLRKCRPGFG

SEQ ID NO: 1337 - protein, 27 aa, synthetic construct
  REGION 1..27: note = epitope within human TNFR2 to which antagonistic antibodies or fragments thereof bind
  VARIANT 6: note = Xaa is Cys residue protected with ACM protecting group
EGCRLXAPLRKGGSGGAPLRKCRPGFG

SEQ ID NO: 1338 - protein, 27 aa, synthetic construct
  REGION 1..27: note = epitope within human TNFR2 to which antagonistic antibodies or fragments thereof bind
  VARIANT 2: note = Xaa is Cys residue protected with ACM protecting group
  VARIANT 17: note = Xaa is Cys residue protected with ACM protecting group
YXALSKQEGCRGGSGGXAPLRKCRPGF

SEQ ID NO: 1339 - protein, 27 aa, synthetic construct
  REGION 1..27: note = epitope within human TNFR2 to which antagonistic antibodies or fragments thereof bind
  VARIANT 3: note = Xaa is Cys residue protected with ACM protecting group
  VARIANT 23: note = Xaa is Cys residue protected with ACM protecting group
LSXGSRCSSDQGGSGGQNRICTXRPGW

SEQ ID NO: 1340 - protein, 27 aa, synthetic construct
  REGION 1..27: note = epitope within human TNFR2 to which antagonistic antibodies or fragments thereof bind
  VARIANT 10: note = Xaa is Cys residue protected with ACM protecting group
LSKQEGCRLXAGGSGGAPLRKCRPGFG

SEQ ID NO: 1341 - protein, 27 aa, synthetic construct
  REGION 1..27: note = epitope within human TNFR2 to which antagonistic antibodies or fragments thereof bind
  VARIANT 22: note = Xaa is Cys residue protected with ACM protecting group
RCSSDQVETQAGGSGGNRICTXRPGWY

SEQ ID NO: 1342 - protein, 27 aa, synthetic construct
  REGION 1..27: note = epitope within human TNFR2 to which antagonistic antibodies or fragments thereof bind
  VARIANT 8: note = Xaa is Cys residue protected with ACM protecting group
KQEGCRLXAPLGGSGGAPLRKCRPGFG

SEQ ID NO: 1343 - protein, 27 aa, synthetic construct
  REGION 1..27: note = epitope within human TNFR2 to which antagonistic antibodies or fragments thereof bind
  VARIANT 9: note = Xaa is Cys residue protected with ACM protecting group
SKQEGCRLXAPGGSGGAPLRKCRPGFG

SEQ ID NO: 1344 - protein, 27 aa, synthetic construct
  REGION 1..27: note = epitope within human TNFR2 to which antagonistic antibodies or fragments thereof bind
  VARIANT 26: note = Xaa is Cys residue protected with ACM protecting group
SRCSSDQVETQGGSGGTREQNRICTXR

SEQ ID NO: 1345 - protein, 27 aa, synthetic construct
  REGION 1..27: note = epitope within human TNFR2 to which antagonistic antibodies or fragments thereof bind
  VARIANT 26: note = Xaa is Cys residue protected with ACM protecting group
RCSSDQVETQAGGSGGTREQNRICTXR

SEQ ID NO: 1346 - protein, 27 aa, synthetic construct
  REGION 1..27: note = epitope within human TNFR2 to which antagonistic antibodies or fragments thereof bind
  VARIANT 11: note = Xaa is Cys residue protected with ACM protecting group
  VARIANT 26: note = Xaa is Cys residue protected with ACM protecting group
CSSDQVETQAXGGSGGTREQNRICTXR

SEQ ID NO: 1347 - protein, 27 aa, synthetic construct
  REGION 1..27: note = epitope within human TNFR2 to which antagonistic antibodies or fragments thereof bind
  VARIANT 4: note = Xaa is Cys residue protected with ACM protecting group
  VARIANT 7: note = Xaa is Cys residue protected with ACM protecting group
  VARIANT 25: note = Xaa is Cys residue protected with ACM protecting group
VPEXLSXGSRCGGSGGREQNRICTXRP

SEQ ID NO: 1348 - protein, 27 aa, synthetic construct
  REGION 1..27: note = epitope within human TNFR2 to which antagonistic antibodies or fragments thereof bind
  VARIANT 3: note = Xaa is Cys residue protected with ACM protecting group
  VARIANT 6: note = Xaa is Cys residue protected with ACM protecting group
  VARIANT 25: note = Xaa is Cys residue protected with ACM protecting group
PEXLSXGSRCSGGSGGREQNRICTXRP

SEQ ID NO: 1349 - protein, 27 aa, synthetic construct
  REGION 1..27: note = epitope within human TNFR2 to which antagonistic antibodies or fragments thereof bind
  VARIANT 2: note = Xaa is Cys residue protected with ACM protecting group
  VARIANT 5: note = Xaa is Cys residue protected with ACM protecting group
  VARIANT 25: note = Xaa is Cys residue protected with ACM protecting group
EXLSXGSRCSSGGSGGREQNRICTXRP

SEQ ID NO: 1350 - protein, 27 aa, synthetic construct
  REGION 1..27: note = epitope within human TNFR2 to which antagonistic antibodies or fragments thereof bind
  VARIANT 1: note = Xaa is Cys residue protected with ACM protecting group
  VARIANT 4: note = Xaa is Cys residue protected with ACM protecting group
  VARIANT 25: note = Xaa is Cys residue protected with ACM protecting group
XLSXGSRCSSDGGSGGREQNRICTXRP

SEQ ID NO: 1351 - protein, 27 aa, synthetic construct
  REGION 1..27: note = epitope within human TNFR2 to which antagonistic antibodies or fragments thereof bind
  VARIANT 3: note = Xaa is Cys residue protected with ACM protecting group
  VARIANT 25: note = Xaa is Cys residue protected with ACM protecting group
LSXGSRCSSDQGGSGGREQNRICTXRP

SEQ ID NO: 1352 - protein, 27 aa, synthetic construct
  REGION 1..27: note = epitope within human TNFR2 to which antagonistic antibodies or fragments thereof bind
  VARIANT 2: note = Xaa is Cys residue protected with ACM protecting group
  VARIANT 25: note = Xaa is Cys residue protected with ACM protecting group
SXGSRCSSDQVGGSGGREQNRICTXRP

SEQ ID NO: 1353 - protein, 27 aa, synthetic construct
  REGION 1..27: note = epitope within human TNFR2 to which antagonistic antibodies or fragments thereof bind
  VARIANT 1: note = Xaa is Cys residue protected with ACM protecting group
  VARIANT 25: note = Xaa is Cys residue protected with ACM protecting group
XGSRCSSDQVEGGSGGREQNRICTXRP

SEQ ID NO: 1354 - protein, 27 aa, synthetic construct
  REGION 1..27: note = epitope within human TNFR2 to which antagonistic antibodies or fragments thereof bind
  VARIANT 25: note = Xaa is Cys residue protected with ACM protecting group
GSRCSSDQVETGGSGGREQNRICTXRP

SEQ ID NO: 1355 - protein, 27 aa, synthetic construct
  REGION 1..27: note = epitope within human TNFR2 to which antagonistic antibodies or fragments thereof bind
  VARIANT 25: note = Xaa is Cys residue protected with ACM protecting group
SRCSSDQVETQGGSGGREQNRICTXRP

SEQ ID NO: 1356 - protein, 27 aa, synthetic construct
  REGION 1..27: note = epitope within human TNFR2 to which antagonistic antibodies or fragments thereof bind
  VARIANT 25: note = Xaa is Cys residue protected with ACM protecting group
RCSSDQVETQAGGSGGREQNRICTXRP

SEQ ID NO: 1357 - protein, 27 aa, synthetic construct
  REGION 1..27: note = epitope within human TNFR2 to which antagonistic antibodies or fragments thereof bind
  VARIANT 11: note = Xaa is Cys residue protected with ACM protecting group
  VARIANT 25: note = Xaa is Cys residue protected with ACM protecting group
CSSDQVETQAXGGSGGREQNRICTXRP

SEQ ID NO: 1358 - protein, 27 aa, synthetic construct
  REGION 1..27: note = epitope within human TNFR2 to which antagonistic antibodies or fragments thereof bind
  VARIANT 4: note = Xaa is Cys residue protected with ACM protecting group
  VARIANT 7: note = Xaa is Cys residue protected with ACM protecting group
  VARIANT 24: note = Xaa is Cys residue protected with ACM protecting group
VPEXLSXGSRCGGSGGEQNRICTXRPG

SEQ ID NO: 1359 - protein, 27 aa, synthetic construct
  REGION 1..27: note = epitope within human TNFR2 to which antagonistic antibodies or fragments thereof bind
  VARIANT 3: note = Xaa is Cys residue protected with ACM protecting group
  VARIANT 6: note = Xaa is Cys residue protected with ACM protecting group
  VARIANT 24: note = Xaa is Cys residue protected with ACM protecting group
PEXLSXGSRCSGGSGGEQNRICTXRPG

SEQ ID NO: 1360 - protein, 27 aa, synthetic construct
  REGION 1..27: note = epitope within human TNFR2 to which antagonistic antibodies or fragments thereof bind
  VARIANT 2: note = Xaa is Cys residue protected with ACM protecting group
  VARIANT 5: note = Xaa is Cys residue protected with ACM protecting group
  VARIANT 24: note = Xaa is Cys residue protected with ACM protecting group
EXLSXGSRCSSGGSGGEQNRICTXRPG

SEQ ID NO: 1361 - protein, 27 aa, synthetic construct
  REGION 1..27: note = epitope within human TNFR2 to which antagonistic antibodies or fragments thereof bind
  VARIANT 1: note = Xaa is Cys residue protected with ACM protecting group
  VARIANT 4: note = Xaa is Cys residue protected with ACM protecting group
  VARIANT 24: note = Xaa is Cys residue protected with ACM protecting group
XLSXGSRCSSDGGSGGEQNRICTXRPG

SEQ ID NO: 1362 - protein, 27 aa, synthetic construct
  REGION 1..27: note = epitope within human TNFR2 to which antagonistic antibodies or fragments thereof bind
  VARIANT 3: note = Xaa is Cys residue protected with ACM protecting group
  VARIANT 24: note = Xaa is Cys residue protected with ACM protecting group
LSXGSRCSSDQGGSGGEQNRICTXRPG

SEQ ID NO: 1363 - protein, 27 aa, synthetic construct
  REGION 1..27: note = epitope within human TNFR2 to which antagonistic antibodies or fragments thereof bind
  VARIANT 2: note = Xaa is Cys residue protected with ACM protecting group
  VARIANT 24: note = Xaa is Cys residue protected with ACM protecting group
SXGSRCSSDQVGGSGGEQNRICTXRPG

SEQ ID NO: 1364 - protein, 27 aa, synthetic construct
  REGION 1..27: note = epitope within human TNFR2 to which antagonistic antibodies or fragments thereof bind
  VARIANT 1: note = Xaa is Cys residue protected with ACM protecting group
  VARIANT 24: note = Xaa is Cys residue protected with ACM protecting group
XGSRCSSDQVEGGSGGEQNRICTXRPG

SEQ ID NO: 1365 - protein, 27 aa, synthetic construct
  REGION 1..27: note = epitope within human TNFR2 to which antagonistic antibodies or fragments thereof bind
  VARIANT 24: note = Xaa is Cys residue protected with ACM protecting group
GSRCSSDQVETGGSGGEQNRICTXRPG

SEQ ID NO: 1366 - protein, 27 aa, synthetic construct
  REGION 1..27: note = epitope within human TNFR2 to which antagonistic antibodies or fragments thereof bind
  VARIANT 24: note = Xaa is Cys residue protected with ACM protecting group
SRCSSDQVETQGGSGGEQNRICTXRPG

SEQ ID NO: 1367 - protein, 27 aa, synthetic construct
  REGION 1..27: note = epitope within human TNFR2 to which antagonistic antibodies or fragments thereof bind
  VARIANT 24: note = Xaa is Cys residue protected with ACM protecting group
RCSSDQVETQAGGSGGEQNRICTXRPG

SEQ ID NO: 1368 - protein, 27 aa, synthetic construct
  REGION 1..27: note = epitope within human TNFR2 to which antagonistic antibodies or fragments thereof bind
  VARIANT 11: note = Xaa is Cys residue protected with ACM protecting group
  VARIANT 24: note = Xaa is Cys residue protected with ACM protecting group
CSSDQVETQAXGGSGGEQNRICTXRPG

SEQ ID NO: 1369 - protein, 27 aa, synthetic construct
  REGION 1..27: note = epitope within human TNFR2 to which antagonistic antibodies or fragments thereof bind
  VARIANT 4: note = Xaa is Cys residue protected with ACM protecting group
  VARIANT 7: note = Xaa is Cys residue protected with ACM protecting group
  VARIANT 23: note = Xaa is Cys residue protected with ACM protecting group
VPEXLSXGSRCGGSGGQNRICTXRPGW

SEQ ID NO: 1370 - protein, 27 aa, synthetic construct
  REGION 1..27: note = epitope within human TNFR2 to which antagonistic antibodies or fragments thereof bind
  VARIANT 3: note = Xaa is Cys residue protected with ACM protecting group
  VARIANT 6: note = Xaa is Cys residue protected with ACM protecting group
  VARIANT 23: note = Xaa is Cys residue protected with ACM protecting group
PEXLSXGSRCSGGSGGQNRICTXRPGW

SEQ ID NO: 1371 - protein, 27 aa, synthetic construct
  REGION 1..27: note = epitope within human TNFR2 to which antagonistic antibodies or fragments thereof bind
  VARIANT 2: note = Xaa is Cys residue protected with ACM protecting group
  VARIANT 5: note = Xaa is Cys residue protected with ACM protecting group
  VARIANT 23: note = Xaa is Cys residue protected with ACM protecting group
EXLSXGSRCSSGGSGGQNRICTXRPGW

SEQ ID NO: 1372 - protein, 27 aa, synthetic construct
  REGION 1..27: note = epitope within human TNFR2 to which antagonistic antibodies or fragments thereof bind
  VARIANT 1: note = Xaa is Cys residue protected with ACM protecting group
  VARIANT 4: note = Xaa is Cys residue protected with ACM protecting group
  VARIANT 23: note = Xaa is Cys residue protected with ACM protecting group
XLSXGSRCSSDGGSGGQNRICTXRPGW

SEQ ID NO: 1373 - protein, 27 aa, synthetic construct
  REGION 1..27: note = epitope within human TNFR2 to which antagonistic antibodies or fragments thereof bind
  VARIANT 3: note = Xaa is Cys residue protected with ACM protecting group
  VARIANT 23: note = Xaa is Cys residue protected with ACM protecting group
LSXGSRCSSDQGGSGGQNRICTXRPGW

SEQ ID NO: 1374 - protein, 27 aa, synthetic construct
  REGION 1..27: note = epitope within human TNFR2 to which antagonistic antibodies or fragments thereof bind
  VARIANT 2: note = Xaa is Cys residue protected with ACM protecting group
  VARIANT 23: note = Xaa is Cys residue protected with ACM protecting group
SXGSRCSSDQVGGSGGQNRICTXRPGW

SEQ ID NO: 1375 - protein, 27 aa, synthetic construct
  REGION 1..27: note = epitope within human TNFR2 to which antagonistic antibodies or fragments thereof bind
  VARIANT 1: note = Xaa is Cys residue protected with ACM protecting group
  VARIANT 23: note = Xaa is Cys residue protected with ACM protecting group
XGSRCSSDQVEGGSGGQNRICTXRPGW

SEQ ID NO: 1376 - protein, 27 aa, synthetic construct
  REGION 1..27: note = epitope within human TNFR2 to which antagonistic antibodies or fragments thereof bind
  VARIANT 23: note = Xaa is Cys residue protected with ACM protecting group
GSRCSSDQVETGGSGGQNRICTXRPGW

SEQ ID NO: 1377 - protein, 27 aa, synthetic construct
  REGION 1..27: note = epitope within human TNFR2 to which antagonistic antibodies or fragments thereof bind
  VARIANT 23: note = Xaa is Cys residue protected with ACM protecting group
SRCSSDQVETQGGSGGQNRICTXRPGW

SEQ ID NO: 1378 - protein, 27 aa, synthetic construct
  REGION 1..27: note = epitope within human TNFR2 to which antagonistic antibodies or fragments thereof bind
  VARIANT 23: note = Xaa is Cys residue protected with ACM protecting group
RCSSDQVETQAGGSGGQNRICTXRPGW

SEQ ID NO: 1379 - protein, 27 aa, synthetic construct
  REGION 1..27: note = epitope within human TNFR2 to which antagonistic antibodies or fragments thereof bind
  VARIANT 11: note = Xaa is Cys residue protected with ACM protecting group
  VARIANT 23: note = Xaa is Cys residue protected with ACM protecting group
CSSDQVETQAXGGSGGQNRICTXRPGW

SEQ ID NO: 1380 - protein, 27 aa, synthetic construct
  REGION 1..27: note = epitope within human TNFR2 to which antagonistic antibodies or fragments thereof bind
  VARIANT 4: note = Xaa is Cys residue protected with ACM protecting group
  VARIANT 7: note = Xaa is Cys residue protected with ACM protecting group
  VARIANT 22: note = Xaa is Cys residue protected with ACM protecting group
VPEXLSXGSRCGGSGGNRICTXRPGWY

SEQ ID NO: 1381 - protein, 27 aa, synthetic construct
  REGION 1..27: note = epitope within human TNFR2 to which antagonistic antibodies or fragments thereof bind
  VARIANT 3: note = Xaa is Cys residue protected with ACM protecting group
  VARIANT 6: note = Xaa is Cys residue protected with ACM protecting group
  VARIANT 22: note = Xaa is Cys residue protected with ACM protecting group
PEXLSXGSRCSGGSGGNRICTXRPGWY

SEQ ID NO: 1382 - protein, 27 aa, synthetic construct
  REGION 1..27: note = epitope within human TNFR2 to which antagonistic antibodies or fragments thereof bind
  VARIANT 2: note = Xaa is Cys residue protected with ACM protecting group
  VARIANT 5: note = Xaa is Cys residue protected with ACM protecting group
  VARIANT 22: note = Xaa is Cys residue protected with ACM protecting group
EXLSXGSRCSSGGSGGNRICTXRPGWY

SEQ ID NO: 1383 - protein, 27 aa, synthetic construct
  REGION 1..27: note = epitope within human TNFR2 to which antagonistic antibodies or fragments thereof bind
  VARIANT 1: note = Xaa is Cys residue protected with ACM protecting group
  VARIANT 4: note = Xaa is Cys residue protected with ACM protecting group
  VARIANT 22: note = Xaa is Cys residue protected with ACM protecting group
XLSXGSRCSSDGGSGGNRICTXRPGWY

SEQ ID NO: 1384 - protein, 27 aa, synthetic construct
  REGION 1..27: note = epitope within human TNFR2 to which antagonistic antibodies or fragments thereof bind
  VARIANT 3: note = Xaa is Cys residue protected with ACM protecting group
  VARIANT 22: note = Xaa is Cys residue protected with ACM protecting group
LSXGSRCSSDQGGSGGNRICTXRPGWY

SEQ ID NO: 1385 - protein, 27 aa, synthetic construct
  REGION 1..27: note = epitope within human TNFR2 to which antagonistic antibodies or fragments thereof bind
  VARIANT 2: note = Xaa is Cys residue protected with ACM protecting group
  VARIANT 22: note = Xaa is Cys residue protected with ACM protecting group
SXGSRCSSDQVGGSGGNRICTXRPGWY

SEQ ID NO: 1386 - protein, 27 aa, synthetic construct
  REGION 1..27: note = epitope within human TNFR2 to which antagonistic antibodies or fragments thereof bind
  VARIANT 1: note = Xaa is Cys residue protected with ACM protecting group
  VARIANT 22: note = Xaa is Cys residue protected with ACM protecting group
XGSRCSSDQVEGGSGGNRICTXRPGWY

SEQ ID NO: 1387 - protein, 27 aa, synthetic construct
  REGION 1..27: note = epitope within human TNFR2 to which antagonistic antibodies or fragments thereof bind
  VARIANT 22: note = Xaa is Cys residue protected with ACM protecting group
GSRCSSDQVETGGSGGNRICTXRPGWY

SEQ ID NO: 1388 - protein, 27 aa, synthetic construct
  REGION 1..27: note = epitope within human TNFR2 to which antagonistic antibodies or fragments thereof bind
  VARIANT 22: note = Xaa is Cys residue protected with ACM protecting group
SRCSSDQVETQGGSGGNRICTXRPGWY

SEQ ID NO: 1389 - protein, 27 aa, synthetic construct
  REGION 1..27: note = epitope within human TNFR2 to which antagonistic antibodies or fragments thereof bind
  VARIANT 22: note = Xaa is Cys residue protected with ACM protecting group
RCSSDQVETQAGGSGGNRICTXRPGWY

SEQ ID NO: 1390 - protein, 27 aa, synthetic construct
  REGION 1..27: note = epitope within human TNFR2 to which antagonistic antibodies or fragments thereof bind
  VARIANT 11: note = Xaa is Cys residue protected with ACM protecting group
  VARIANT 22: note = Xaa is Cys residue protected with ACM protecting group
CSSDQVETQAXGGSGGNRICTXRPGWY

SEQ ID NO: 1391 - protein, 27 aa, synthetic construct
  REGION 1..27: note = epitope within human TNFR2 to which antagonistic antibodies or fragments thereof bind
  VARIANT 4: note = Xaa is Cys residue protected with ACM protecting group
  VARIANT 7: note = Xaa is Cys residue protected with ACM protecting group
  VARIANT 21: note = Xaa is Cys residue protected with ACM protecting group
  VARIANT 27: note = Xaa is Cys residue protected with ACM protecting group
VPEXLSXGSRCGGSGGRICTXRPGWYX

SEQ ID NO: 1392 - protein, 27 aa, synthetic construct
  REGION 1..27: note = epitope within human TNFR2 to which antagonistic antibodies or fragments thereof bind
  VARIANT 3: note = Xaa is Cys residue protected with ACM protecting group
  VARIANT 6: note = Xaa is Cys residue protected with ACM protecting group
  VARIANT 21: note = Xaa is Cys residue protected with ACM protecting group
  VARIANT 27: note = Xaa is Cys residue protected with ACM protecting group
PEXLSXGSRCSGGSGGRICTXRPGWYX

SEQ ID NO: 1393 - protein, 27 aa, synthetic construct
  REGION 1..27: note = epitope within human TNFR2 to which antagonistic antibodies or fragments thereof bind
  VARIANT 2: note = Xaa is Cys residue protected with ACM protecting group
  VARIANT 5: note = Xaa is Cys residue protected with ACM protecting group
  VARIANT 21: note = Xaa is Cys residue protected with ACM protecting group
  VARIANT 27: note = Xaa is Cys residue protected with ACM protecting group
EXLSXGSRCSSGGSGGRICTXRPGWYX

SEQ ID NO: 1394 - protein, 27 aa, synthetic construct
  REGION 1..27: note = epitope within human TNFR2 to which antagonistic antibodies or fragments thereof bind
  VARIANT 1: note = Xaa is Cys residue protected with ACM protecting group
  VARIANT 4: note = Xaa is Cys residue protected with ACM protecting group
  VARIANT 21: note = Xaa is Cys residue protected with ACM protecting group
  VARIANT 27: note = Xaa is Cys residue protected with ACM protecting group
XLSXGSRCSSDGGSGGRICTXRPGWYX

SEQ ID NO: 1395 - protein, 27 aa, synthetic construct
  REGION 1..27: note = epitope within human TNFR2 to which antagonistic antibodies or fragments thereof bind
  VARIANT 3: note = Xaa is Cys residue protected with ACM protecting group
  VARIANT 21: note = Xaa is Cys residue protected with ACM protecting group
  VARIANT 27: note = Xaa is Cys residue protected with ACM protecting group
LSXGSRCSSDQGGSGGRICTXRPGWYX

SEQ ID NO: 1396 - protein, 27 aa, synthetic construct
  REGION 1..27: note = epitope within human TNFR2 to which antagonistic antibodies or fragments thereof bind
  VARIANT 2: note = Xaa is Cys residue protected with ACM protecting group
  VARIANT 21: note = Xaa is Cys residue protected with ACM protecting group
  VARIANT 27: note = Xaa is Cys residue protected with ACM protecting group
SXGSRCSSDQVGGSGGRICTXRPGWYX

SEQ ID NO: 1397 - protein, 27 aa, synthetic construct
  REGION 1..27: note = epitope within human TNFR2 to which antagonistic antibodies or fragments thereof bind
  VARIANT 1: note = Xaa is Cys residue protected with ACM protecting group
  VARIANT 21: note = Xaa is Cys residue protected with ACM protecting group
  VARIANT 27: note = Xaa is Cys residue protected with ACM protecting group
XGSRCSSDQVEGGSGGRICTXRPGWYX

SEQ ID NO: 1398 - protein, 27 aa, synthetic construct
  REGION 1..27: note = epitope within human TNFR2 to which antagonistic antibodies or fragments thereof bind
  VARIANT 21: note = Xaa is Cys residue protected with ACM protecting group
  VARIANT 27: note = Xaa is Cys residue protected with ACM protecting group
GSRCSSDQVETGGSGGRICTXRPGWYX

SEQ ID NO: 1399 - protein, 27 aa, synthetic construct
  REGION 1..27: note = epitope within human TNFR2 to which antagonistic antibodies or fragments thereof bind
  VARIANT 21: note = Xaa is Cys residue protected with ACM protecting group
  VARIANT 27: note = Xaa is Cys residue protected with ACM protecting group
SRCSSDQVETQGGSGGRICTXRPGWYX

SEQ ID NO: 1400 - protein, 27 aa, synthetic construct
  REGION 1..27: note = epitope within human TNFR2 to which antagonistic antibodies or fragments thereof bind
  VARIANT 21: note = Xaa is Cys residue protected with ACM protecting group
  VARIANT 27: note = Xaa is Cys residue protected with ACM protecting group
RCSSDQVETQAGGSGGRICTXRPGWYX

SEQ ID NO: 1401 - protein, 27 aa, synthetic construct
  REGION 1..27: note = epitope within human TNFR2 to which antagonistic antibodies or fragments thereof bind
  VARIANT 11: note = Xaa is Cys residue protected with ACM protecting group
  VARIANT 21: note = Xaa is Cys residue protected with ACM protecting group
  VARIANT 27: note = Xaa is Cys residue protected with ACM protecting group
CSSDQVETQAXGGSGGRICTXRPGWYX

SEQ ID NO: 1402 - protein, 27 aa, synthetic construct
  REGION 1..27: note = epitope within human TNFR2 to which antagonistic antibodies or fragments thereof bind
  VARIANT 4: note = Xaa is Cys residue protected with ACM protecting group
  VARIANT 7: note = Xaa is Cys residue protected with ACM protecting group
  VARIANT 20: note = Xaa is Cys residue protected with ACM protecting group
  VARIANT 26: note = Xaa is Cys residue protected with ACM protecting group
VPEXLSXGSRCGGSGGICTXRPGWYXA

SEQ ID NO: 1403 - protein, 27 aa, synthetic construct
  REGION 1..27: note = epitope within human TNFR2 to which antagonistic antibodies or fragments thereof bind
  VARIANT 3: note = Xaa is Cys residue protected with ACM protecting group
  VARIANT 6: note = Xaa is Cys residue protected with ACM protecting group
  VARIANT 20: note = Xaa is Cys residue protected with ACM protecting group
  VARIANT 26: note = Xaa is Cys residue protected with ACM protecting group
PEXLSXGSRCSGGSGGICTXRPGWYXA

SEQ ID NO: 1404 - protein, 27 aa, synthetic construct
  REGION 1..27: note = epitope within human TNFR2 to which antagonistic antibodies or fragments thereof bind
  VARIANT 2: note = Xaa is Cys residue protected with ACM protecting group
  VARIANT 5: note = Xaa is Cys residue protected with ACM protecting group
  VARIANT 20: note = Xaa is Cys residue protected with ACM protecting group
  VARIANT 26: note = Xaa is Cys residue protected with ACM protecting group
EXLSXGSRCSSGGSGGICTXRPGWYXA

SEQ ID NO: 1405 - protein, 27 aa, synthetic construct
  REGION 1..27: note = epitope within human TNFR2 to which antagonistic antibodies or fragments thereof bind
  VARIANT 1: note = Xaa is Cys residue protected with ACM protecting group
  VARIANT 20: note = Xaa is Cys residue protected with ACM protecting group
  VARIANT 26: note = Xaa is Cys residue protected with ACM protecting group
XGSRCSSDQVEGGSGGICTXRPGWYXA

SEQ ID NO: 1406 - protein, 27 aa, synthetic construct
  REGION 1..27: note = epitope within human TNFR2 to which antagonistic antibodies or fragments thereof bind
  VARIANT 20: note = Xaa is Cys residue protected with ACM protecting group
  VARIANT 26: note = Xaa is Cys residue protected with ACM protecting group
GSRCSSDQVETGGSGGICTXRPGWYXA

SEQ ID NO: 1407 - protein, 27 aa, synthetic construct
  REGION 1..27: note = epitope within human TNFR2 to which antagonistic antibodies or fragments thereof bind
  VARIANT 20: note = Xaa is Cys residue protected with ACM protecting group
  VARIANT 26: note = Xaa is Cys residue protected with ACM protecting group
SRCSSDQVETQGGSGGICTXRPGWYXA

SEQ ID NO: 1408 - protein, 27 aa, synthetic construct
  REGION 1..27: note = epitope within human TNFR2 to which antagonistic antibodies or fragments thereof bind
  VARIANT 20: note = Xaa is Cys residue protected with ACM protecting group
  VARIANT 26: note = Xaa is Cys residue protected with ACM protecting group
RCSSDQVETQAGGSGGICTXRPGWYXA

SEQ ID NO: 1409 - protein, 27 aa, synthetic construct
  REGION 1..27: note = epitope within human TNFR2 to which antagonistic antibodies or fragments thereof bind
  VARIANT 11: note = Xaa is Cys residue protected with ACM protecting group
  VARIANT 20: note = Xaa is Cys residue protected with ACM protecting group
  VARIANT 26: note = Xaa is Cys residue protected with ACM protecting group
CSSDQVETQAXGGSGGICTXRPGWYXA

SEQ ID NO: 1410 - protein, 27 aa, synthetic construct
  REGION 1..27: note = epitope within human TNFR2 to which antagonistic antibodies or fragments thereof bind
  VARIANT 4: note = Xaa is Cys residue protected with ACM protecting group
  VARIANT 7: note = Xaa is Cys residue protected with ACM protecting group
  VARIANT 19: note = Xaa is Cys residue protected with ACM protecting group
  VARIANT 25: note = Xaa is Cys residue protected with ACM protecting group
VPEXLSXGSRCGGSGGCTXRPGWYXAL

SEQ ID NO: 1411 - protein, 27 aa, synthetic construct
  REGION 1..27: note = epitope within human TNFR2 to which antagonistic antibodies or fragments thereof bind
  VARIANT 3: note = Xaa is Cys residue protected with ACM protecting group
  VARIANT 6: note = Xaa is Cys residue protected with ACM protecting group
  VARIANT 19: note = Xaa is Cys residue protected with ACM protecting group
  VARIANT 25: note = Xaa is Cys residue protected with ACM protecting group
PEXLSXGSRCSGGSGGCTXRPGWYXAL

SEQ ID NO: 1412 - protein, 27 aa, synthetic construct
  REGION 1..27: note = epitope within human TNFR2 to which antagonistic antibodies or fragments thereof bind
  VARIANT 2: note = Xaa is Cys residue protected with ACM protecting group
  VARIANT 5: note = Xaa is Cys residue protected with ACM protecting group
  VARIANT 19: note = Xaa is Cys residue protected with ACM protecting group
  VARIANT 25: note = Xaa is Cys residue protected with ACM protecting group
EXLSXGSRCSSGGSGGCTXRPGWYXAL

SEQ ID NO: 1413 - protein, 27 aa, synthetic construct
  REGION 1..27: note = epitope within human TNFR2 to which antagonistic antibodies or fragments thereof bind
  VARIANT 1: note = Xaa is Cys residue protected with ACM protecting group
  VARIANT 4: note = Xaa is Cys residue protected with ACM protecting group
  VARIANT 19: note = Xaa is Cys residue protected with ACM protecting group
  VARIANT 25: note = Xaa is Cys residue protected with ACM protecting group
XLSXGSRCSSDGGSGGCTXRPGWYXAL

SEQ ID NO: 1414 - protein, 27 aa, synthetic construct
  REGION 1..27: note = epitope within human TNFR2 to which antagonistic antibodies or fragments thereof bind
  VARIANT 3: note = Xaa is Cys residue protected with ACM protecting group
  VARIANT 19: note = Xaa is Cys residue protected with ACM protecting group
  VARIANT 25: note = Xaa is Cys residue protected with ACM protecting group
LSXGSRCSSDQGGSGGCTXRPGWYXAL

SEQ ID NO: 1415 - protein, 27 aa, synthetic construct
  REGION 1..27: note = epitope within human TNFR2 to which antagonistic antibodies or fragments thereof bind
  VARIANT 2: note = Xaa is Cys residue protected with ACM protecting group
  VARIANT 19: note = Xaa is Cys residue protected with ACM protecting group
  VARIANT 25: note = Xaa is Cys residue protected with ACM protecting group
SXGSRCSSDQVGGSGGCTXRPGWYXAL

SEQ ID NO: 1416 - protein, 27 aa, synthetic construct
  REGION 1..27: note = epitope within human TNFR2 to which antagonistic antibodies or fragments thereof bind
  VARIANT 1: note = Xaa is Cys residue protected with ACM protecting group
  VARIANT 19: note = Xaa is Cys residue protected with ACM protecting group
  VARIANT 25: note = Xaa is Cys residue protected with ACM protecting group
XGSRCSSDQVEGGSGGCTXRPGWYXAL

SEQ ID NO: 1417 - protein, 27 aa, synthetic construct
  REGION 1..27: note = epitope within human TNFR2 to which antagonistic antibodies or fragments thereof bind
  VARIANT 19: note = Xaa is Cys residue protected with ACM protecting group
  VARIANT 25: note = Xaa is Cys residue protected with ACM protecting group
GSRCSSDQVETGGSGGCTXRPGWYXAL

SEQ ID NO: 1418 - protein, 27 aa, synthetic construct
  REGION 1..27: note = epitope within human TNFR2 to which antagonistic antibodies or fragments thereof bind
  VARIANT 19: note = Xaa is Cys residue protected with ACM protecting group
  VARIANT 25: note = Xaa is Cys residue protected with ACM protecting group
SRCSSDQVETQGGSGGCTXRPGWYXAL

SEQ ID NO: 1419 - protein, 27 aa, synthetic construct
  REGION 1..27: note = epitope within human TNFR2 to which antagonistic antibodies or fragments thereof bind
  VARIANT 19: note = Xaa is Cys residue protected with ACM protecting group
  VARIANT 25: note = Xaa is Cys residue protected with ACM protecting group
RCSSDQVETQAGGSGGCTXRPGWYXAL

SEQ ID NO: 1420 - protein, 27 aa, synthetic construct
  REGION 1..27: note = epitope within human TNFR2 to which antagonistic antibodies or fragments thereof bind
  VARIANT 11: note = Xaa is Cys residue protected with ACM protecting group
  VARIANT 19: note = Xaa is Cys residue protected with ACM protecting group
  VARIANT 25: note = Xaa is Cys residue protected with ACM protecting group
CSSDQVETQAXGGSGGCTXRPGWYXAL

SEQ ID NO: 1421 - protein, 27 aa, synthetic construct
  REGION 1..27: note = epitope within human TNFR2 to which antagonistic antibodies or fragments thereof bind
  VARIANT 1: note = Xaa is Cys residue protected with ACM protecting group
  VARIANT 9: note = Xaa is Cys residue protected with ACM protecting group
XTREQNRIXTCGGSGGRPGWYCALSKQ

SEQ ID NO: 1422 - protein, 27 aa, synthetic construct
  REGION 1..27: note = epitope within human TNFR2 to which antagonistic antibodies or fragments thereof bind
  VARIANT 8: note = Xaa is Cys residue protected with ACM protecting group
TREQNRIXTCRGGSGGRPGWYCALSKQ

SEQ ID NO: 1423 - protein, 27 aa, synthetic construct
  REGION 1..27: note = epitope within human TNFR2 to which antagonistic antibodies or fragments thereof bind
  VARIANT 7: note = Xaa is Cys residue protected with ACM protecting group
REQNRIXTCRPGGSGGRPGWYCALSKQ

SEQ ID NO: 1424 - protein, 27 aa, synthetic construct
  REGION 1..27: note = epitope within human TNFR2 to which antagonistic antibodies or fragments thereof bind
  VARIANT 6: note = Xaa is Cys residue protected with ACM protecting group
EQNRIXTCRPGGGSGGRPGWYCALSKQ

SEQ ID NO: 1425 - protein, 27 aa, synthetic construct
  REGION 1..27: note = epitope within human TNFR2 to which antagonistic antibodies or fragments thereof bind
  VARIANT 5: note = Xaa is Cys residue protected with ACM protecting group
QNRIXTCRPGWGGSGGRPGWYCALSKQ

SEQ ID NO: 1426 - protein, 27 aa, synthetic construct
  REGION 1..27: note = epitope within human TNFR2 to which antagonistic antibodies or fragments thereof bind
  VARIANT 4: note = Xaa can be any naturally occurring amino acid
NRIXTCRPGWYGGSGGRPGWYCALSKQ

SEQ ID NO: 1427 - protein, 27 aa, synthetic construct
  REGION 1..27: note = epitope within human TNFR2 to which antagonistic antibodies or fragments thereof bind
  VARIANT 3: note = Xaa is Cys residue protected with ACM protecting group
  VARIANT 17: note = Xaa is Cys residue protected with ACM protecting group
WYXALSKQEGCGGSGGXAPLRKCRPGF

SEQ ID NO: 1428 - protein, 27 aa, synthetic construct
  REGION 1..27: note = epitope within human TNFR2 to which antagonistic antibodies or fragments thereof bind
  VARIANT 2: note = Xaa is Cys residue protected with ACM protecting group
  VARIANT 17: note = Xaa is Cys residue protected with ACM protecting group
YXALSKQEGCRGGSGGXAPLRKCRPGF

SEQ ID NO: 1429 - protein, 27 aa, synthetic construct
  REGION 1..27: note = epitope within human TNFR2 to which antagonistic antibodies or fragments thereof bind
  VARIANT 1: note = Xaa is Cys residue protected with ACM protecting group
  VARIANT 17: note = Xaa is Cys residue protected with ACM protecting group
XALSKQEGCRLGGSGGXAPLRKCRPGF

SEQ ID NO: 1430 - protein, 27 aa, synthetic construct
  REGION 1..27: note = epitope within human TNFR2 to which antagonistic antibodies or fragments thereof bind
  VARIANT 11: note = Xaa is Cys residue protected with ACM protecting group
  VARIANT 17: note = Xaa is Cys residue protected with ACM protecting group
ALSKQEGCRLXGGSGGXAPLRKCRPGF

SEQ ID NO: 1431 - protein, 27 aa, synthetic construct
  REGION 1..27: note = epitope within human TNFR2 to which antagonistic antibodies or fragments thereof bind
  VARIANT 10: note = Xaa is Cys residue protected with ACM protecting group
  VARIANT 17: note = Xaa is Cys residue protected with ACM protecting group
LSKQEGCRLXAGGSGGXAPLRKCRPGF

SEQ ID NO: 1432 - protein, 27 aa, synthetic construct
  REGION 1..27: note = epitope within human TNFR2 to which antagonistic antibodies or fragments thereof bind
  VARIANT 9: note = Xaa is Cys residue protected with ACM protecting group
  VARIANT 17: note = Xaa is Cys residue protected with ACM protecting group
SKQEGCRLXAPGGSGGXAPLRKCRPGF

SEQ ID NO: 1433 - protein, 27 aa, synthetic construct
  REGION 1..27: note = epitope within human TNFR2 to which antagonistic antibodies or fragments thereof bind
  VARIANT 8: note = Xaa is Cys residue protected with ACM protecting group
  VARIANT 17: note = Xaa is Cys residue protected with ACM protecting group
KQEGCRLXAPLGGSGGXAPLRKCRPGF

SEQ ID NO: 1434 - protein, 27 aa, synthetic construct
  REGION 1..27: note = epitope within human TNFR2 to which antagonistic antibodies or fragments thereof bind
  VARIANT 7: note = Xaa is Cys residue protected with ACM protecting group
  VARIANT 17: note = Xaa is Cys residue protected with ACM protecting group
QEGCRLXAPLRGGSGGXAPLRKCRPGF

SEQ ID NO: 1435 - protein, 27 aa, synthetic construct
  REGION 1..27: note = epitope within human TNFR2 to which antagonistic antibodies or fragments thereof bind
  VARIANT 6: note = Xaa is Cys residue protected with ACM protecting group
  VARIANT 17: note = Xaa is Cys residue protected with ACM protecting group
EGCRLXAPLRKGGSGGXAPLRKCRPGF

SEQ ID NO: 1436 - protein, 27 aa, synthetic construct
  REGION 1..27: note = epitope within human TNFR2 to which antagonistic antibodies or fragments thereof bind
  VARIANT 3: note = Xaa is Cys residue protected with ACM protecting group
WYXALSKQEGCGGSGGAPLRKCRPGFG

SEQ ID NO: 1437 - protein, 27 aa, synthetic construct
  REGION 1..27: note = epitope within human TNFR2 to which antagonistic antibodies or fragments thereof bind
  VARIANT 2: note = Xaa is Cys residue protected with ACM protecting group
YXALSKQEGCRGGSGGAPLRKCRPGFG

SEQ ID NO: 1438 - protein, 27 aa, synthetic construct
  REGION 1..27: note = epitope within human TNFR2 to which antagonistic antibodies or fragments thereof bind
  VARIANT 1: note = Xaa is Cys residue protected with ACM protecting group
XALSKQEGCRLGGSGGAPLRKCRPGFG

SEQ ID NO: 1439 - protein, 27 aa, synthetic construct
  REGION 1..27: note = epitope within human TNFR2 to which antagonistic antibodies or fragments thereof bind
  VARIANT 11: note = Xaa is Cys residue protected with ACM protecting group
ALSKQEGCRLXGGSGGAPLRKCRPGFG

SEQ ID NO: 1440 - protein, 27 aa, synthetic construct
  REGION 1..27: note = epitope within human TNFR2 to which antagonistic antibodies or fragments thereof bind
  VARIANT 10: note = Xaa is Cys residue protected with ACM protecting group
LSKQEGCRLXAGGSGGAPLRKCRPGFG

SEQ ID NO: 1441 - protein, 27 aa, synthetic construct
  REGION 1..27: note = epitope within human TNFR2 to which antagonistic antibodies or fragments thereof bind
  VARIANT 9: note = Xaa is Cys residue protected with ACM protecting group
SKQEGCRLXAPGGSGGAPLRKCRPGFG

SEQ ID NO: 1442 - protein, 27 aa, synthetic construct
  REGION 1..27: note = epitope within human TNFR2 to which antagonistic antibodies or fragments thereof bind
  VARIANT 8: note = Xaa is Cys residue protected with ACM protecting group
KQEGCRLXAPLGGSGGAPLRKCRPGFG

SEQ ID NO: 1443 - protein, 27 aa, synthetic construct
  REGION 1..27: note = epitope within human TNFR2 to which antagonistic antibodies or fragments thereof bind
  VARIANT 7: note = Xaa is Cys residue protected with ACM protecting group
QEGCRLXAPLRGGSGGAPLRKCRPGFG

SEQ ID NO: 1444 - protein, 27 aa, synthetic construct
  REGION 1..27: note = epitope within human TNFR2 to which antagonistic antibodies or fragments thereof bind
  VARIANT 6: note = Xaa is Cys residue protected with ACM protecting group
EGCRLXAPLRKGGSGGAPLRKCRPGFG

SEQ ID NO: 1445 - protein, 27 aa, synthetic construct
  REGION 1..27: note = epitope within human TNFR2 to which antagonistic antibodies or fragments thereof bind
  VARIANT 3: note = Xaa is Cys residue protected with ACM protecting group
WYXALSKQEGCGGSGGPLRKCRPGFGV

SEQ ID NO: 1446 - protein, 27 aa, synthetic construct
  REGION 1..27: note = epitope within human TNFR2 to which antagonistic antibodies or fragments thereof bind
  VARIANT 2: note = Xaa is Cys residue protected with ACM protecting group
YXALSKQEGCRGGSGGPLRKCRPGFGV

SEQ ID NO: 1447 - protein, 27 aa, synthetic construct
  REGION 1..27: note = epitope within human TNFR2 to which antagonistic antibodies or fragments thereof bind
  VARIANT 1: note = Xaa is Cys residue protected with ACM protecting group
XALSKQEGCRLGGSGGPLRKCRPGFGV

SEQ ID NO: 1448 - protein, 27 aa, synthetic construct
  REGION 1..27: note = epitope within human TNFR2 to which antagonistic antibodies or fragments thereof bind
  VARIANT 11: note = Xaa is Cys residue protected with ACM protecting group
ALSKQEGCRLXGGSGGPLRKCRPGFGV

SEQ ID NO: 1449 - protein, 27 aa, synthetic construct
  REGION 1..27: note = epitope within human TNFR2 to which antagonistic antibodies or fragments thereof bind
  VARIANT 10: note = Xaa is Cys residue protected with ACM protecting group
LSKQEGCRLXAGGSGGPLRKCRPGFGV

SEQ ID NO: 1450 - protein, 27 aa, synthetic construct
  REGION 1..27: note = epitope within human TNFR2 to which antagonistic antibodies or fragments thereof bind
  VARIANT 9: note = Xaa is Cys residue protected with ACM protecting group
SKQEGCRLXAPGGSGGPLRKCRPGFGV

SEQ ID NO: 1451 - protein, 27 aa, synthetic construct
  REGION 1..27: note = epitope within human TNFR2 to which antagonistic antibodies or fragments thereof bind
  VARIANT 8: note = Xaa is Cys residue protected with ACM protecting group
KQEGCRLXAPLGGSGGPLRKCRPGFGV

SEQ ID NO: 1452 - protein, 27 aa, synthetic construct
  REGION 1..27: note = epitope within human TNFR2 to which antagonistic antibodies or fragments thereof bind
  VARIANT 7: note = Xaa is Cys residue protected with ACM protecting group
QEGCRLXAPLRGGSGGPLRKCRPGFGV

SEQ ID NO: 1453 - protein, 27 aa, synthetic construct
  REGION 1..27: note = epitope within human TNFR2 to which antagonistic antibodies or fragments thereof bind
  VARIANT 6: note = Xaa is Cys residue protected with ACM protecting group
EGCRLXAPLRKGGSGGPLRKCRPGFGV

SEQ ID NO: 1454 - protein, 27 aa, synthetic construct
  REGION 1..27: note = epitope within human TNFR2 to which antagonistic antibodies or fragments thereof bind
  VARIANT 3: note = Xaa is Cys residue protected with ACM protecting group
WYXALSKQEGCGGSGGLRKCRPGFGVA

SEQ ID NO: 1455 - protein, 27 aa, synthetic construct
  REGION 1..27: note = epitope within human TNFR2 to which antagonistic antibodies or fragments thereof bind
  VARIANT 2: note = Xaa is Cys residue protected with ACM protecting group
YXALSKQEGCRGGSGGRKCRPGFGVAR

SEQ ID NO: 1456 - protein, 27 aa, synthetic construct
  REGION 1..27: note = epitope within human TNFR2 to which antagonistic antibodies or fragments thereof bind
  VARIANT 1: note = Xaa is Cys residue protected with ACM protecting group
XALSKQEGCRLGGSGGRKCRPGFGVAR

SEQ ID NO: 1457 - protein, 27 aa, synthetic construct
  REGION 1..27: note = epitope within human TNFR2 to which antagonistic antibodies or fragments thereof bind
  VARIANT 11: note = Xaa is Cys residue protected with ACM protecting group
ALSKQEGCRLXGGSGGRKCRPGFGVAR

SEQ ID NO: 1458 - protein, 27 aa, synthetic construct
  REGION 1..27: note = epitope within human TNFR2 to which antagonistic antibodies or fragments thereof bind
  VARIANT 10: note = Xaa is Cys residue protected with ACM protecting group
LSKQEGCRLXAGGSGGRKCRPGFGVAR

SEQ ID NO: 1459 - protein, 27 aa, synthetic construct
  REGION 1..27: note = epitope within human TNFR2 to which antagonistic antibodies or fragments thereof bind
  VARIANT 9: note = Xaa is Cys residue protected with ACM protecting group
SKQEGCRLXAPGGSGGRKCRPGFGVAR

SEQ ID NO: 1460 - protein, 27 aa, synthetic construct
  REGION 1..27: note = epitope within human TNFR2 to which antagonistic antibodies or fragments thereof bind
  VARIANT 8: note = Xaa is Cys residue protected with ACM protecting group
KQEGCRLXAPLGGSGGRKCRPGFGVAR

SEQ ID NO: 1461 - protein, 27 aa, synthetic construct
  REGION 1..27: note = epitope within human TNFR2 to which antagonistic antibodies or fragments thereof bind
  VARIANT 7: note = Xaa is Cys residue protected with ACM protecting group
QEGCRLXAPLRGGSGGRKCRPGFGVAR

SEQ ID NO: 1462 - protein, 27 aa, synthetic construct
  REGION 1..27: note = epitope within human TNFR2 to which antagonistic antibodies or fragments thereof bind
  VARIANT 6: note = Xaa is Cys residue protected with ACM protecting group
EGCRLXAPLRKGGSGGRKCRPGFGVAR

SEQ ID NO: 1463 - protein, 11 aa, synthetic construct
  REGION 1..11: note = epitope within human TNFR2 to which antagonistic antibodies or fragments thereof bind
LRKCRPGFGVA

SEQ ID NO: 1464 - protein, 13 aa, synthetic construct
  REGION 1..13: note = epitope within human TNFR2 to which antagonistic antibodies or fragments thereof bind
VVCKPCAPGTFSN

SEQ ID NO: 1465 - protein, 645 aa, synthetic construct
  REGION 1..645: note = RB242 human EGFR ECD w/ modifications T15S and G564S (residue numbering does not include signal peptide)
  SIGNAL 1..24: note = signal peptide
  DOMAIN 25..645: note = EGFR/HER1 extracellular domain (ECD)
MRPSGTAGAALLALLAALCPASRALEEKKVCQGTSNKLSQLGTFEDHFLSLQRMFNNCEVVLGNLEITYVQRNYDLSFLKTIQEVAGYVLIALNTVERIPLENLQIIRGNMYYENSYALAVLSNYDANKTGLKELPMRNLQEILHGAVRFSNNPALCNVESIQWRDIVSSDFLSNMSMDFQNHLGSCQKCDPSCPNGSCWGAGEENCQKLTKIICAQQCSGRCRGKSPSDCCHNQCAAGCTGPRESDCLVCRKFRDEATCKDTCPPLMLYNPTTYQMDVNPEGKYSFGATCVKKCPRNYVVTDHGSCVRACGADSYEMEEDGVRKCKKCEGPCRKVCNGIGIGEFKDSLSINATNIKHFKNCTSISGDLHILPVAFRGDSFTHTPPLDPQELDILKTVKEITGFLLIQAWPENRTDLHAFENLEIIRGRTKQHGQFSLAVVSLNITSLGLRSLKEISDGDVIISGNKNLCYANTINWKKLFGTSGQKTKIISNRGENSCKATGQVCHALCSPEGCWGPEPRDCVSCRNVSRGRECVDKCKLLEGEPREFVENSECIQCHPECLPQAMNITCTGRGPDNCIQCAHYIDSPHCVKTCPAGVMGENNTLVWKYADAGHVCHLCHPNCTYGCTGPGLEGCPTNGPKIPS

SEQ ID NO: 1466 - protein, 621 aa, synthetic construct
  REGION 1..621: note = RB242 human EGFR ECD (without the signal peptide), with modifications T15S and G564S
LEEKKVCQGTSNKLSQLGTFEDHFLSLQRMFNNCEVVLGNLEITYVQRNYDLSFLKTIQEVAGYVLIALNTVERIPLENLQIIRGNMYYENSYALAVLSNYDANKTGLKELPMRNLQEILHGAVRFSNNPALCNVESIQWRDIVSSDFLSNMSMDFQNHLGSCQKCDPSCPNGSCWGAGEENCQKLTKIICAQQCSGRCRGKSPSDCCHNQCAAGCTGPRESDCLVCRKFRDEATCKDTCPPLMLYNPTTYQMDVNPEGKYSFGATCVKKCPRNYVVTDHGSCVRACGADSYEMEEDGVRKCKKCEGPCRKVCNGIGIGEFKDSLSINATNIKHFKNCTSISGDLHILPVAFRGDSFTHTPPLDPQELDILKTVKEITGFLLIQAWPENRTDLHAFENLEIIRGRTKQHGQFSLAVVSLNITSLGLRSLKEISDGDVIISGNKNLCYANTINWKKLFGTSGQKTKIISNRGENSCKATGQVCHALCSPEGCWGPEPRDCVSCRNVSRGRECVDKCKLLEGEPREFVENSECIQCHPECLPQAMNITCTGRGPDNCIQCAHYIDSPHCVKTCPAGVMGENNTLVWKYADAGHVCHLCHPNCTYGCTGPGLEGCPTNGPKIPS

SEQ ID NO: 1467 - protein, 643 aa, synthetic construct
  REGION 1..643: note = RB242 human HER3 ECD with modification Y246A (residue numbering does not include signal peptide)
  SIGNAL 1..19: note = signal peptide
  DOMAIN 20..643: note = HER3 extracellular domain (ECD)
MRANDALQVLGLLFSLARGSEVGNSQAVCPGTLNGLSVTGDAENQYQTLYKLYERCEVVMGNLEIVLTGHNADLSFLQWIREVTGYVLVAMNEFSTLPLPNLRVVRGTQVYDGKFAIFVMLNYNTNSSHALRQLRLTQLTEILSGGVYIEKNDKLCHMDTIDWRDIVRDRDAEIVVKDNGRSCPPCHEVCKGRCWGPGSEDCQTLTKTICAPQCNGHCFGPNPNQCCHDECAGGCSGPQDTDCFACRHFNDSGACVPRCPQPLVANKLTFQLEPNPHTKYQYGGVCVASCPHNFVVDQTSCVRACPPDKMEVDKNGLKMCEPCGGLCPKACEGTGSGSRFQTVDSSNIDGFVNCTKILGNLDFLITGLNGDPWHKIPALDPEKLNVFRTVREITGYLNIQSWPPHMHNFSVFSNLTTIGGRSLYNRGFSLLIMKNLNVTSLGFRSLKEISAGRIYISANRQLCYHHSLNWTKVLRGPTEERLDIKHNRPRRDCVAEGKVCDPLCSSGGCWGPGPGQCLSCRNYSRGGVCVTHCNFLNGEPREFAHEAECFSCHPECQPMEGTATCNGSGSDTCAQCAHFRDGPHCVSSCPHGVLGAKGPIYKYPDVQNECRPCHENCTQGCKGPELQDCLGQTLVLIGKTHLT

SEQ ID NO: 1468 - protein, 624 aa, synthetic construct
  REGION 1..624: note = RB242 human HER3 ECD (without signal peptide), with modification Y246A
SEVGNSQAVCPGTLNGLSVTGDAENQYQTLYKLYERCEVVMGNLEIVLTGHNADLSFLQWIREVTGYVLVAMNEFSTLPLPNLRVVRGTQVYDGKFAIFVMLNYNTNSSHALRQLRLTQLTEILSGGVYIEKNDKLCHMDTIDWRDIVRDRDAEIVVKDNGRSCPPCHEVCKGRCWGPGSEDCQTLTKTICAPQCNGHCFGPNPNQCCHDECAGGCSGPQDTDCFACRHFNDSGACVPRCPQPLVANKLTFQLEPNPHTKYQYGGVCVASCPHNFVVDQTSCVRACPPDKMEVDKNGLKMCEPCGGLCPKACEGTGSGSRFQTVDSSNIDGFVNCTKILGNLDFLITGLNGDPWHKIPALDPEKLNVFRTVREITGYLNIQSWPPHMHNFSVFSNLTTIGGRSLYNRGFSLLIMKNLNVTSLGFRSLKEISAGRIYISANRQLCYHHSLNWTKVLRGPTEERLDIKHNRPRRDCVAEGKVCDPLCSSGGCWGPGPGQCLSCRNYSRGGVCVTHCNFLNGEPREFAHEAECFSCHPECQPMEGTATCNGSGSDTCAQCAHFRDGPHCVSSCPHGVLGAKGPIYKYPDVQNECRPCHENCTQGCKGPELQDCLGQTLVLIGKTHLT

SEQ ID NO: 1469 - protein, 227 aa, synthetic construct
  REGION 1..227: note = Human IgG1 Fc with knob mutations S354C and T366W (by EU numbering)
  SITE 1..10: note = DKTHTCPPCP = portion of hinge region of human IgG1
  DOMAIN 11..227: note = CH2 and CH3 domains of human IgG1
DKTHTCPPCPAPELLGGPSVFLFPPKPKDTLMISRTPEVTCVVVDVSHEDPEVKFNWYVDGVEVHNAKTKPREEQYNSTYRVVSVLTVLHQDWLNGKEYKCKVSNKALPAPIEKTISKAKGQPREPQVYTLPPCRDELTKNQVSLWCLVKGFYPSDIAVEWESNGQPENNYKTTPPVLDSDGSFFLYSKLTVDKSRWQQGNVFSCSVMHEALHNHYTQKSLSLSPGK

SEQ ID NO: 1470 - protein, 227 aa, synthetic construct
  source 1..227: note = Human IgG1 Fc with hole mutations Y349C, T366S, L368A and Y407V (by EU numbering)
  REGION 1..10: note = DKTHTCPPCP = portion of hinge region of human IgG1
  REGION 11..227: note = CH2 and CH3 domains of human IgG1
DKTHTCPPCPAPELLGGPSVFLFPPKPKDTLMISRTPEVTCVVVDVSHEDPEVKFNWYVDGVEVHNAKTKPREEQYNSTYRVVSVLTVLHQDWLNGKEYKCKVSNKALPAPIEKTISKAKGQPREPQVCTLPPSRDELTKNQVSLSCAVKGFYPSDIAVEWESNGQPENNYKTTPPVLDSDGSFFLVSKLTVDKSRWQQGNVFSCSVMHEALHNHYTQKSLSLSPGK

SEQ ID NO: 1471 - protein, 5 aa, synthetic construct
  REGION 1..5: note = GS linker
  REPEAT 1..5: note = occurring 1, 2, 3, 4 or 5 times
GGGGS

SEQ ID NO: 1472 - protein, 5 aa, synthetic construct
  REGION 1..5: note = GS linker
  REPEAT 1..5: note = occurring 1, 2, 3, 4, 5, 6, 7, 8, 9 or 10 times
GGGGS

SEQ ID NO: 1473 - protein, 6 aa, synthetic construct
  REGION 1..6: note = Gly linker
GGGGGG

SEQ ID NO: 1474 - protein, 8 aa, synthetic construct
  REGION 1..8: note = Gly linker
GGGGGGGG

SEQ ID NO: 1475 - protein, 732 aa, synthetic construct
  REGION 1..732: note = Construct containing Vhh-4
  SIGNAL 1..19: note = mouse immunoglobulin heavy-chain leader sequence
  DOMAIN 20..138: note = anti-TNFR1 dAb
  PEPTIDE 139..147: note = Linker
  DOMAIN 148..732: note = Human Serum Albumin (HSA)
MEWSWVFLFFLSVTTGVHSEVQLLESGGGLVQPGGSLRLSCAASGFTFAHETMVWVRQAPGKGLEWVSHIPPDGQDPFYADSVKGRFTISRDNSKNTLYLQMNSLRAEDTAVYHCALLPKRGPWFDYWGQGTLVTVSSGGGGSGGGGDAHKSEVAHRFKDLGEENFKALVLIAFAQYLQQCPFEDHVKLVNEVTEFAKTCVADESAENCDKSLHTLFGDKLCTVATLRETYGEMADCCAKQEPERNECFLQHKDDNPNLPRLVRPEVDVMCTAFHDNEETFLKKYLYEIARRHPYFYAPELLFFAKRYKAAFTECCQAADKAACLLPKLDELRDEGKASSAKQRLKCASLQKFGERAFKAWAVARLSQRFPKAEFAEVSKLVTDLTKVHTECCHGDLLECADDRADLAKYICENQDSISSKLKECCEKPLLEKSHCIAEVENDEMPADLPSLAADFVESKDVCKNYAEAKDVFLGMFLYEYARRHPDYSVVLLLRLAKTYETTLEKCCAAADPHECYAKVFDEFKPLVEEPQNLIKQNCELFEQLGEYKFQNALLVRYTKKVPQVSTPTLVEVSRNLGKVGSKCCKHPEAKRMPCAEDYLSVVLNQLCVLHEKTPVSDRVTKCCTESLVNRRPCFSALEVDETYVPKEFNAETFTFHADICTLSEKERQIKKQTALVELVKHKPKATKEQLKAVMDDFAAFVEKCCKADDKETCFAEEGKKLVAASQAALGL

SEQ ID NO: 1476 - protein, 19 aa, Mus musculus
  REGION 1..19: note = mouse immunoglobulin heavy-chain leader sequence Uniprot: A0N1R4
MEWSWVFLFFLSVTTGVHS

SEQ ID NO: 1477 - protein, 7 aa, synthetic construct
  REGION 1..7: note = Linker
GGSGGGG

SEQ ID NO: 1478 - protein, 116 aa, synthetic construct
  REGION 1..116: note = Vhh-2
EVQLLESGGGLVQPGGSLRLSCAASGFTFSQYRMHWVRQAPGKSLEWVSSIDTRGSSTYYADPVKGRFTISRDNSKNTLYLQMNSLRAEDTAVYYCAKAVTMFSPFFDYWGQGTLV

SEQ ID NO: 1479 - protein, 122 aa, synthetic construct
  REGION 1..122: note = Vhh
EEVQLLESGGGLVQAGGSLRLSCAASGFTFAHETMVWVRQAPGKGLEWVSHIPPDGQDPFYADSVKGRFFTISRDNSKNTLYLQMNSLRAEDTAVYHCALLPKRGPWFDYWGQGTLYTVSSA

SEQ ID NO: 1480 - protein, 110 aa, synthetic construct
  source 1..110: note = Nb19 truncated
QVQLQESGGGVVQPGGSLTLSCTRTGLTPSTGAVGWYRQAPGKKCELVSYITIPSGRTTYTDSVKGRFAISRDKAKNTVFLQMNSLKPEDTALYYCGDVPYSTIQAMCTD

SEQ ID NO: 1481 - protein, 110 aa, synthetic construct
  source 1..110: note = Nb20 Truncated
QVQLQESGGGVVQPGGSLTLSCTRTGLTASTNAVGWYRQAPGKKCELVSYITIPSGRTTYADSVKGRFAISRDKAKNTVFLQMNSLKPEDTALYYCGDVPYSTIQAMCTD

SEQ ID NO: 1482 - protein, 110 aa, synthetic construct
  source 1..110: note = Nb96 truncated at 110
QVQLQESGGGVVQPGGSLTLSCTRTGFTASTNAVGWYRQGPGKKCEWVSYMTIPSGRTTYADAVKGRFAMSRDKAKSTVFLQMNSLKPEDTAVYYCGDVPFSTLPAMCTN

SEQ ID NO: 1483 - protein, 110 aa, synthetic construct; identical to SEQ ID NO: 1482
  source 1..110: note = Nb107 truncated

SEQ ID NO: 1484 - protein, 110 aa, synthetic construct
  source 1..110: note = Nb9 truncated at 110
QVQLQESGGGVVQPGGSLTLSCTRTGFTASTNAVGWYRQAPGKKCELVSYITIPSGRTTYADAVKGRFAISRDKAKNTVFLQMNSLKPEDTAVYYCGDVPFSTLPAMCTN

SEQ ID NO: 1485 - protein, 110 aa, synthetic construct; identical to SEQ ID NO: 1484
  source 1..110: note = Nb9 truncated at 110

SEQ ID NO: 1486 - protein, 106 aa, synthetic construct
  source 1..106: note = Nb70 truncated
QVQLQESGGGLVQAGGPLRLSCAASVRTFSSYAMGWFRQAPGKEREFVAAISWSGGSTYYADSVKGRFTISRDNAKNTVYLQMNSLKPEDTAVYYCAVLHEDLYEY

SEQ ID NO: 1487 - protein, 100 aa, synthetic construct
  source 1..100: note = Nb22 truncated at 100
QVQLQESGGGLVQSGGSLRLSCRASGFTFSHYPMSWYRQAPGKKRELVAGIYTDGSTNYADSVKGRFTISRDNAKNTVYLQMSSLKPEDTAVYYCRRSMV

SEQ ID NO: 1488 - protein, 246 aa, synthetic construct
  source 1..246: note = EN1206 monovalent seq1_-hole
  MOTIF 1..19: note = leader sequence
  VARIANT 51: note = M252Y
  VARIANT 53: note = S254T
  VARIANT 55: note = T256E
  VARIANT 33: note = L234A
  VARIANT 34: note = L235A
  VARIANT 128: note = P329G
  VARIANT 165: note = T366S
  VARIANT 167: note = L368A
  VARIANT 206: note = Y407V
  REGION 20..246: note = Fc region
MGWSCIILFLVATATGVHSDKTHTCPPCPAPEAAGGPSVFLFPPKPKDTLYITREPEVTCVVVDVSHEDPEVKFNWYVDGVEVHNAKTKPREEQYNSTYRVVSVLTVLHQDWLNGKEYKCKVSNKALGAPIEKTISKAKGQPREPQVYTLPPSRDELTKNQVSLSCAVKGFYPSDIAVEWESNGQPENNYKTTPPVLDSDGSFFLVSKLTVDKSRWQQGNVFSCSVMHEALHNHYTQKSLSLSPGK

SEQ ID NO: 1489 - protein, 365 aa, synthetic construct
  source 1..365: note = EN1206 monovalent seq2_-knob
  VARIANT 284: note = T366W
  VARIANT 170: note = M252Y
  VARIANT 172: note = S254T
  VARIANT 174: note = T256E
  VARIANT 152: note = L234A
  VARIANT 153: note = L235A
  VARIANT 247: note = P329G
  REGION 20..138: note = VHH1
  REGION 139..365: note = Fc
MGWSCIILFLVATATGVHSEVQLLESGGGLVQPGGSLRLSCAASGFTFAHETMVWVRQAPGKGLEWVSHIPPDGQDPFYADSVKGRFTISRDNSKNTLYLQMNSLRAEDTAVYHCALLPKRGPWFDYWGQGTLVTVSSDKTHTCPPCPAPEAAGGPSVFLFPPKPKDTLYITREPEVTCVVVDVSHEDPEVKFNWYVDGVEVHNAKTKPREEQYNSTYRVVSVLTVLHQDWLNGKEYKCKVSNKALGAPIEKTISKAKGQPREPQVYTLPPSRDELTKNQVSLWCLVKGFYPSDIAVEWESNGQPENNYKTTPPVLDSDGSFFLYSKLTVDKSRWQQGNVFSCSVMHEALHNHYTQKSLSLSPGK

SEQ ID NO: 1490 - protein, 365 aa, synthetic construct
  source 1..365: note = EN1206 bivalent
  VARIANT 170: note = M252Y
  VARIANT 172: note = S254T
  VARIANT 174: note = T256E
  VARIANT 152: note = L234A
  VARIANT 153: note = L235A
  VARIANT 247: note = P329G
  REGION 20..138: note = VhH1
  REGION 139..365: note = Fc
MGWSCIILFLVATATGVHSEVQLLESGGGLVQPGGSLRLSCAASGFTFAHETMVWVRQAPGKGLEWVSHIPPDGQDPFYADSVKGRFTISRDNSKNTLYLQMNSLRAEDTAVYHCALLPKRGPWFDYWGQGTLVTVSSDKTHTCPPCPAPEAAGGPSVFLFPPKPKDTLYITREPEVTCVVVDVSHEDPEVKFNWYVDGVEVHNAKTKPREEQYNSTYRVVSVLTVLHQDWLNGKEYKCKVSNKALGAPIEKTISKAKGQPREPQVYTLPPSRDELTKNQVSLTCLVKGFYPSDIAVEWESNGQPENNYKTTPPVLDSDGSFFLYSKLTVDKSRWQQGNVFSCSVMHEALHNHYTQKSLSLSPGK

SEQ ID NO: 1491 - protein, 365 aa, synthetic construct
  source 1..365: note = EN1208 YTE-LALAPG
  VARIANT 170: note = M252Y
  VARIANT 172: note = S254T
  VARIANT 174: note = T256E
  VARIANT 152: note = L234A
  VARIANT 153: note = L235A
  VARIANT 247: note = P329G
  REGION 20..138: note = Vhh1
  REGION 139..365: note = Fc
MGWSCIILFLVATATGVHSEVQLLESGGGLVQPGGSLRLSCAASGFTFDKYSMGWVRQAPGKGLEWVSQISDTADRTYYAHAVKGRFTISRDNSKNTLYLQMNSLRAEDTAVYYCAIYTGRWVPFEYWGQGTLVTVSSDKTHTCPPCPAPEAAGGPSVFLFPPKPKDTLYITREPEVTCVVVDVSHEDPEVKFNWYVDGVEVHNAKTKPREEQYNSTYRVVSVLTVLHQDWLNGKEYKCKVSNKALGAPIEKTISKAKGQPREPQVYTLPPSRDELTKNQVSLTCLVKGFYPSDIAVEWESNGQPENNYKTTPPVLDSDGSFFLYSKLTVDKSRWQQGNVFSCSVMHEALHNHYTQKSLSLSPGK

SEQ ID NO: 1492 - protein, 119 aa, synthetic construct; identical to SEQ ID NO: 55
  source 1..119: note = Polypeptide sequence of DOM1h-131-206

SEQ ID NO: 1493 - protein, 157 aa, synthetic construct
  source 1..157: note = EN-1000-206 (206) VhH single domain polypeptide with leader sequence and HIS tail
MEWSWVFLFFLSVTTGVHSEVQLLESGGGLVQPGGSLRLSCAASGFTFAHETMVWVRQAPGKGLEWVSHIPPDGQDPFYADSVKGRFTISRDNSKNTLYLQMNSLRAEDTAVYHCALLPKRGPWFDYWGQGTLVTVSSGGGGAGGGGHHHHHHHHHH

SEQ ID NO: 1494 - protein, 157 aa, synthetic construct
  source 1..157: note = 541(208) VhH1 single domain polypeptide with leader sequence and HIS tail
MEWSWVFLFFLSVTTGVHSEVQLLESGGGLVQPGGSLRLSCAASGFTFDKYSMGWVRQAPGKGLEWVSQISDTADRTYYAHAVKGRFTISRDNSKNTLYLQMNSLRAEDTAVYYCAIYTGRWVPFEYWGQGTLVTVSSGGGGAGGGGHHHHHHHHHH

SEQ ID NO: 1495 - protein, 126 aa, synthetic construct
  source 1..126: note = 208a Truncated version of 208
MEWSWVFLFFLSVTTGVHSEVQLLESGGGLVQPGGSLRLSCAASGFTFDKYSMGWVRQAPGKGLEWVSQISDTADRTYYAHAVKGRFTISRDNSKNTLYLQMNSLRAGGGGAGGGGHHHHHHHHHH

SEQ ID NO: 1496 - protein, 162 aa, synthetic construct
  source 1..162: note = 019 Nanobody sequence plus leader sequence and HIS tail
MEWSWVFLFFLSVTTGVHSQVQLQESGGGVVQPGGSLTLSCTRTGLTPSTGAVGWYRQAPGKKCELVSYITIPSGRTTYTDSVKGRFAISRDKAKNTVFLQMNSLKPEDTALYYCGDVPYSTIQAMCTDDGPWGQGTQVTVSSGGGGAGGGGHHHHHHHHHH

SEQ ID NO: 1497 - protein, 123 aa, synthetic construct
  source 1..123: note = Nb19
QVQLQESGGGVVQPGGSLTLSCTRTGLTPSTGAVGWYRQAPGKKCELVSYITIPSGRTTYTDSVKGRFAISRDKAKNTVFLQMNSLKPEDTALYYCGDVPYSTIQAMCTDDGPWGQTQVTVSS

SEQ ID NO: 1498 - protein, 123 aa, synthetic construct
  source 1..123: note = Nb20
QVQLQESGGGVVQPGGSLTLSCTRTGLTASTNAVGWYRQAPGKKCELVSYITIPSGRTTYADSVKGRFAISRDKAKNTVFLQMNSLKPEDTALYYCGDVPYSTIQAMCTDDGPWGQTQVTVSS

SEQ ID NO: 1499 - protein, 123 aa, synthetic construct
  source 1..123: note = Nb107
QVQLQESGGGVVQPGGSLTLSCTRTGFTASTNAVGWYRQGPGKKCEWVSYMTIPSGRTTYADAVKGRFAMSRDKAKSTVLLQMNSLKPEDTAVYYCGDVPFSTLPAMCTNDGPWGQTQVTVSS

SEQ ID NO: 1500 - protein, 123 aa, synthetic construct
  source 1..123: note = Nb9
QVQLQESGGGVVQPGGSLTLSCTRTGFTASTNAVGWYRQAPGKKCELVSYITIPSGRTTYADAVKGRFAISRDKAKNTVFLQMNSLKPEDTAVYYCGDVPFSTLPAMCTNDGPWGQTQVTVSS

SEQ ID NO: 1501 - protein, 118 aa, synthetic construct
  source 1..118: note = Nb23
QVQLQESGGGLVQPGGSLRLSCAASGRTFSYYTMAWFRQAPGKEREFVASISWSGGITYYADSVKGRFTISRDNAKNTVYLQMNSLKPEDTAVYYCAARKEPGSAYFGSGQTQVTVSS

SEQ ID NO: 1502 - protein, 112 aa, synthetic construct
  source 1..112: note = Nb97
QVQLQESGGGLVQSGGSLRLSCRASGFTFSHYPMSWYRQAPGKKRELVAGIYTDGSTNYADSVKGRFTISRDNAKNTVYLQMSSLKPEDTAVYYCRRSMVSVYGQTQVTVSS

SEQ ID NO: 1503 - protein, 227 aa, synthetic construct
  source 1..227: note = IgG1 Fc YTE (M252Y,S254T,T256E) LALAPG (L234A,L235A,P329G)
  VARIANT 14: note = L234A
  VARIANT 15: note = L235A
  VARIANT 109: note = P329G
  VARIANT 32: note = M252Y
  VARIANT 34: note = S254T
  VARIANT 36: note = T256E
DKTHTCPPCPAPEAAGGPSVFLFPPKPKDTLYITREPEVTCVVVDVSHEDPEVKFNWYVDGVEVHNAKTKPREEQYNSTYRVVSVLTVLHQDWLNGKEYKCKVSNKALGAPIEKTISKAKGQPREPQVYTLPPSRDELTKNQVSLTCLVKGFYPSDIAVEWESNGQPENNYKTTPPVLDSDGSFFLYSKLTVDKSRWQQGNVFSCSVMHEALHNHYTQKSLSLSPGK

SEQ ID NO: 1504 - protein, 227 aa, synthetic construct
  source 1..227: note = IgG1 Fc Knobs only Sequence with YTE (M252Y,S254T,T256E) LALAPG (L234A,L235A,P329G)
  VARIANT 146: note = T366W
DKTHTCPPCPAPEAAGGPSVFLFPPKPKDTLYITREPEVTCVVVDVSHEDPEVKFNWYVDGVEVHNAKTKPREEQYNSTYRVVSVLTVLHQDWLNGKEYKCKVSNKALGAPIEKTISKAKGQPREPQVYTLPPSRDELTKNQVSLWCLVKGFYPSDIAVEWESNGQPENNYKTTPPVLDSDGSFFLYSKLTVDKSRWQQGNVFSCSVMHEALHNHYTQKSLSLSPGK

SEQ ID NO: 1505 - protein, 227 aa, synthetic construct
  source 1..227: note = IgG1 Fc Holes Only with YTE (M252Y,S254T,T256E) LALAPG (L234A,L235A,P329G)
  VARIANT 187: note = Y407V
  VARIANT 146: note = T366S
  VARIANT 148: note = L368A
DKTHTCPPCPAPEAAGGPSVFLFPPKPKDTLYITREPEVTCVVVDVSHEDPEVKFNWYVDGVEVHNAKTKPREEQYNSTYRVVSVLTVLHQDWLNGKEYKCKVSNKALGAPIEKTISKAKGQPREPQVYTLPPSRDELTKNQVSLSCAVKGFYPSDIAVEWESNGQPENNYKTTPPVLDSDGSFFLVSKLTVDKSRWQQGNVFSCSVMHEALHNHYTQKSLSLSPGK

SEQ ID NO: 1506 - protein, 346 aa, synthetic construct
  source 1..346: note = Chain 2 of EN1206 monovalent dAB (no leader sequence) (knob+YTE and LALAPG)
  VARIANT 228: note = T366W (Knob)
  VARIANT 133: note = L234A
  VARIANT 134: note = L235A
  VARIANT 151: note = M252Y
  VARIANT 153: note = S254T
  VARIANT 155: note = T256E
EVQLLESGGGLVQPGGSLRLSCAASGFTFAHETMVWVRQAPGKGLEWVSHIPPDGQDPFYADSVKGRFTISRDNSKNTLYLQMNSLRAEDTAVYHCALLPKRGPWFDYWGQGTLVTVSSDKTHTCPPCPAPEAAGGPSVFLFPPKPKDTLYITREPEVTCVVVDVSHEDPEVKFNWYVDGVEVHNAKTKPREEQYNSTYRVVSVLTVLHQDWLNGKEYKCKVSNKALGAPIEKTISKAKGQPREPQVYTLPPSRDELTKNQVSLWCLVKGFYPSDIAVEWESNGQPENNYKTTPPVLDSDGSFFLYSKLTVDKSRWQQGNVFSCSVMHEALHNHYTQKSLSLSPGK

SEQ ID NO: 1507 - protein, 346 aa, synthetic construct
  source 1..346: note = EN1206-BV, Fc with YTE and LALAPG mutations, without leader sequence
  VARIANT 228: note = P329G
  VARIANT 151: note = M252Y
  VARIANT 153: note = S254T
  VARIANT 155: note = T256E
  VARIANT 133: note = L234A
  VARIANT 134: note = L235A
EVQLLESGGGLVQPGGSLRLSCAASGFTFAHETMVWVRQAPGKGLEWVSHIPPDGQDPFYADSVKGRFTISRDNSKNTLYLQMNSLRAEDTAVYHCALLPKRGPWFDYWGQGTLVTVSSDKTHTCPPCPAPEAAGGPSVFLFPPKPKDTLYITREPEVTCVVVDVSHEDPEVKFNWYVDGVEVHNAKTKPREEQYNSTYRVVSVLTVLHQDWLNGKEYKCKVSNKALGAPIEKTISKAKGQPREPQVYTLPPSRDELTKNQVSLTCLVKGFYPSDIAVEWESNGQPENNYKTTPPVLDSDGSFFLYSKLTVDKSRWQQGNVFSCSVMHEALHNHYTQKSLSLSPGK

SEQ ID NO: 1508 - protein, 346 aa, synthetic construct
  VARIANT 151: note = M252Y
  VARIANT 153: note = S254T
  VARIANT 155: note = T256E
  VARIANT 133: note = L234A
  VARIANT 134: note = L235A
  VARIANT 228: note = P329G
EVQLLESGGGLVQPGGSLRLSCAASGFTFDKYSMGWVRQAPGKGLEWVSQISDTADRTYYAHAVKGRFTISRDNSKNTLYLQMNSLRAEDTAVYYCAIYTGRWVPFEYWGQGTLVTVSSDKTHTCPPCPAPEAAGGPSVFLFPPKPKDTLYITREPEVTCVVVDVSHEDPEVKFNWYVDGVEVHNAKTKPREEQYNSTYRVVSVLTVLHQDWLNGKEYKCKVSNKALGAPIEKTISKAKGQPREPQVYTLPPSRDELTKNQVSLTCLVKGFYPSDIAVEWESNGQPENNYKTTPPVLDSDGSFFLYSKLTVDKSRWQQGNVFSCSVMHEALHNHYTQKSLSLSPGK

SEQ ID NO: 1509 - protein, 19 aa, synthetic construct
  source 1..19: note = leader sequence
MGWSCIILFLVATATGVHS

SEQ ID NO: 1510 - protein, 6 aa, synthetic construct
  source 1..6: note = DOM1h-131-511 HCDR1 (also DOM1h-131-206)
AHETMV

SEQ ID NO: 1511 - protein, 17 aa, synthetic construct
  source 1..17: note = DOM1h-131-511 HCDR2
HIPPVGQDPFYADSVKG

SEQ ID NO: 1512 - protein, 10 aa, synthetic construct
  source 1..10: note = DOM1h-131-511 HCDR3 (also DOM1h-131-206)
LPKRGPWFDY

SEQ ID NO: 1513 - protein, 17 aa, synthetic construct
  source 1..17: note = DOM1h-131-206 HCDR2
HIPPDGQDPFYADSVKG

What is claimed:

1. A construct that is a tumor necrosis factor receptor 1 (TNFR1) antagonist, comprising two polypeptide chains that are the same or different; wherein:
each chain has the formula 1: [chemical structure]
each of n and q is an integer, where n is 0 or 1, and q is 1;
p is 0, 1, 2 or 3;
at least one chain comprises a TNFR1 inhibitor molecule;
the TNFR1 inhibitor molecule binds TNFR1 to inhibit (antagonize) TNFR1;
a linker increases flexibility of the construct, and/or moderates or reduces steric effects of the construct or its interaction with a receptor, and/or increases solubility of the construct in aqueous medium;
the TNFR1 inhibitor comprises a domain antibody (dAb);
the dAb comprises a sequence set forth in any of SEQ ID NOs: 55-84, 86-88, 450, 495-498, which each bind to the same epitope on TNFR1 as the dAb of SEQ ID NO:59; and
an activity modifier is a moiety that modulates or alters the activity or the pharmacological property of the construct compared to the construct in the absence of the activity modifier;
the activity modifier is a modified Fc;
the modified Fc comprises one or more of a)-d):
a) one or more amino acid mutations to increase serum half-life, and, when the construct has one TNFR1 inhibitor and q=2, the Fc has modification(s) to introduce knobs-into-holes;
b) a modification(s) to increase or enhance neonatal Fc receptor (FcRn) recycling;
c) a modification(s) to reduce or eliminate immune effector functions, selected from among one or more of complement-dependent cytotoxicity (CDC), antibody-dependent cell-mediated cytotoxicity (ADCC) and antibody-dependent cell-mediated phagocytosis (ADCP).

2. The construct of claim 1, wherein the dAb binds to the domain 3 of the TNFR1 extracellular domain (ECD) with an affinity of about 300-500 pM as measured by SPR.

3. The construct of claim 1, wherein n is 1 on each chain, whereby the construct is bivalent; or
for one chain, n is 0 and the modified Fc comprises a knob or hole, and for the other chain n is 1, and the Fc comprises a knob or hole whereby construct forms two chains with a single dAb.

4. The construct of claim 1, wherein the modified Fc comprises the mutations designated YTE (M252Y,S254T,T256E with reference to SEQ ID NO:1503) to extend half-life, and the mutations designed LALAPG (L234A,L235A,P329G with reference to residue positions in SEQ ID NO:1503) to minimize its in vivo Fc effector function.

5. The construct of claim 3 that is designated EN-1206 bivalent or EN-1206, wherein the constructs comprise the dAb of SEQ ID NO:59 and do not have TNFR1 agonist activity.

6. The construct of claim 1, that comprises two chains, wherein for one chain n is 1, and for the other chain n is 0, whereby the resulting construct comprises one chain that contains the dAb and modified Fc, and the other chain is a modified Fc, whereby the resulting construct is monovalent.

7. The construct of claim 1, wherein n is 1 for each chain, whereby the construct is bivalent; and the resulting the construct does not have TNRF1 agonist activity.

8. A polypeptide chain for forming a construct of claim 1, wherein a chain is selected from:
a) SEQ ID NO:1488, which is an Fc only comprising, by EU numbering, T366S, L368A,Y407V to form a hole, M252Y, S254T, T256E for increased half-life, L234A, L235A, P329G for minimizing, eliminating, or reducing Fc effector function, and includes a leader sequence, MGWSCIILFLVATATGVHS (SEQ ID NO:1509), that is cleaved off in a cell in which the polypeptide is expressed and comprises the sequence:
MGWSCIILFLVATATGVHSDKTHTCPPCPAPEAAGGPSVFLFPPK
PKDTLYITREPEVTCVVVDVSHEDPEVKFNWYVDGVEVHNAKTKP
REEQYNSTYRVVSVLTVLHQDWLNGKEYKCKVSNKALGAPIEKTI
SKAKGQPREPQVYTLPPSRDELTKNQVSLSCAVKGFYPSDIAVEW
ESNGQPENNYKTTPPVLDSDGSFFLVSKLTVDKSRWQQGNVFSCS
VMHEALHNHYTQKSLSLSPGK;
b) SEQ ID NO:1489, which comprises a dAb and Fc, where the Fc comprises the modifications, by EU numbering, T366W to form a knob, M252Y, S254T, T256E for increased half-life, and L234A, L235A, P329G for minimizing, reducing, or eliminating Fc effector function, and the chain includes a leader sequence, MGWSCIILFLVATATGVHS (SEQ ID NO:1509) that is cleaved off in a cell in which is the polypeptide is expressed:
MGWSCIILFLVATATGVHSEVQLLESGGGLVQPGGSLRLSCAASG
FTFAHETMVWVRQAPGKGLEWVSHIPPDGQDPFYADSVKGRFTIS
RDNSKNTLYLQMNSLRAEDTAVYHCALLPKRGPWFDYWGQGTLVT
VSSDKTHTCPPCPAPEAAGGPSVFLFPPKPKDTLYITREPEVTCV
VVDVSHEDPEVKFNWYVDGVEVHNAKTKPREEQYNSTYRVVSVLT
VLHQDWLNGKEYKCKVSNKALGAPIEKTISKAKGQPREPQVYTLP
PSRDELTKNQVSLWCLVKGFYPSDIAVEWESNGQPENNYKTTPPV
LDSDGSFFLYSKLTVDKSRWQQGNVFSCSVMHEALHNHYTQKSLS
LSPGK;
c) SEQ ID NO:1505, which is an Fc with the modifications, by EU numbering, T366S, L368A, Y407V to form a hole, M252Y, S254T, T256E for increased half-life, L234A, L235A, P329G for minimizing, reducing, or eliminating Fc effector function, and comprises the sequence:
DKTHTCPPCPAPEAAGGPSVFLFPPKPKDTLYITREPEVTCVVVD
VSHEDPEVKFNWYVDGVEVHNAKTKPREEQYNSTYRVVSVLTVLH
QDWLNGKEYKCKVSNKALGAPIEKTISKAKGQPREPQVYTLPPSR
DELTKNQVSLSCAVKGFYPSDIAVEWESNGQPENNYKTTPPVLDS
DGSFFLVSKLTVDKSRWQQGNVFSCSVMHEALHNHYTQKSLSLSP
GK.
and
d) SEQ ID NO:1506, which comprises a dAb and Fc, where the Fc comprises the modifications, by EU numbering, T366W to form a knob, M252Y, S254T, T256E for increased half-life, and L234A, L235A, P329G for minimizing, reducing, or eliminating Fc effector function, and comprises the sequence:
EVQLLESGGGLVQPGGSLRLSCAASGFTFAHETMVWVRQAPGKGL
EWVSHIPPDGQDPFYADSVKGRFTISRDNSKNTLYLQMNSLRAED
TAVYHCALLPKRGPWFDYWGQGTLVTVSSDKTHTCPPCPAPEAAG
GPSVFLFPPKPKDTLYITREPEVTCVVVDVSHEDPEVKFNWYVDG
VEVHNAKTKPREEQYNSTYRVVSVLTVLHQDWLNGKEYKCKVSNK
ALGAPIEKTISKAKGQPREPQVYTLPPSRDELTKNQVSLWCLVKG
FYPSDIAVEWESNGQPENNYKTTPPVLDSDGSFFLYSKLTVDKSR
WQQGNVFSCSVMHEALHNHYTQKSLSLSPGK.

9. A chain for forming the construct of claim 1 that is a monovalent construct comprising two chains, where one chain comprises EN1206 and the Fc with hole, and the other chain comprises EN1206 and the Fc with knob, wherein:
each chain, when expressed in a cell, comprises the leader sequence MGWSCIILFLVATATGVHS that is cleaved when expressed in a cell and is not present in the resulting construct; and
each chain, when expressed in a cell, comprises the leader sequence and comprises the sequences:
a) the first chain is an Fc with modified residues, by EU numbering, T366S, L368A,Y407V to form a hole, M252Y, S254T, T256E for increasing half-life and L234A, L235A, P329G for minimizing, reducing, or eliminating Fc effector function and having the sequence (SEQ ID NO:1488):
MGWSCIILFLVATATGVHSDKTHTCPPCPAPEAAGGPSVFLFPPK
PKDTLYITREPEVTCVVVDVSHEDPEVKFNWYVDGVEVHNAKTKP
REEQYNSTYRVVSVLTVLHQDWLNGKEYKCKVSNKALGAPIEKTI
SKAKGQPREPQVYTLPPSRDELTKNQVSLSCAVKGFYPSDIAVEW
ESNGQPENNYKTTPPVLDSDGSFFLVSKLTVDKSRWQQGNVFSCS
VMHEALHNHYTQKSLSLSPGK,
wherein MGWSCIILFLVATATGVHS (SEQ ID NO:1509) is a leader sequence present when the chain is expressed, but is not present in the two chain monovalent construct; and
b) the second chain comprises the dAb and a modified Fc with T366W to form a knob, M252Y, S254T, T256E for increasing half-life, and L234A, L235A, P329G minimizing, reducing, or eliminating Fc effector function and having the sequence (SEQ ID NO:1489):
MGWSCIILFLVATATGVHSEVQLLESGGGLVQPGGSLRLSCAASGF
TFAHETMVWVRQAPGKGLEWVSHIPPDGQDPFYADSVKGRFTISRD
NSKNTLYLQMNSLRAEDTAVYHCALLPKRGPWFDYWGQGTLVTVSS
DKTHTCPPCPAPEAAGGPSVFLFPPKPKDTLYITREPEVTCVVVDV
SHEDPEVKFNWYVDGVEVHNAKTKPREEQYNSTYRVVSVLTVLHQD
WLNGKEYKCKVSNKALGAPIEKTISKAKGQPREPQVYTLPPSRDEL
TKNQVSLWCLVKGFYPSDIAVEWESNGQPENNYKTTPPVLDSDGSF
FLYSKLTVDKSRWQQGNVFSCSVMHEALHNHYTQKSLSLSPGK,
wherein MGWSCIILFLVATATGVHS (SEQ ID NO:1509) is a leader sequence present when the chain is expressed, but is not present in the two chain construct.

10. The construct of claim 1, comprising two chains, wherein:
a) the construct is a monovalent construct designated EN1206-MV, wherein:
i) chain 1 in the construct comprises the polypeptide of SEQ ID NO:1505 that is a modified Fc with modifications numbered by reference to SEQ ID NO:1503 by EU numbering: T366S,L368A,Y407V, to form a hole; YTE (M252Y,S254T,T256E), for increased half-life, and LALAPG (L234A,L235A,P329G), for minimized in vivo Fc effector function; wherein the resulting chain comprises the sequence:
DKTHTCPPCPAPEAAGGPSVFLFPPKPKDTLYITREPEVTCVVVDV
SHEDPEVKFNWYVDGVEVHNAKTKPREEQYNSTYRVVSVLTVLHQD
WLNGKEYKCKVSNKALGAPIEKTISKAKGQPREPQVYTLPPSRDEL
TKNQVSLSCAVKGFYPSDIAVEWESNGQPENNYKTTPPVLDSDGSF
FLVSKLTVDKSRWQQGNVFSCSVMHEALHNHYTQKSLSLSPGK;
and
ii) chain 2 comprises a monovalent dAb with an Fe knob (T366W) by EU numbering, and is modified for increased half-life and minimized Fc effector function including, respectively, YTE (M252Y,S254T,T256E, by EU numbering), and LALAPG (L234A,L235A,P329G, by EU numbering), wherein the chain comprises the polypeptide of SEQ ID NO:1506:
EVQLLESGGGLVQPGGSLRLSCAASGFTFAHETMVWVRQAPGKGLE
WVSHIPPDGQDPFYADSVKGRFTISRDNSKNTLYLQMNSLRAEDTA
VYHCALLPKRGPWFDYWGQGTLVTVSSDKTHTCPPCPAPEAAGGPS
VFLFPPKPKDTLYITREPEVTCVVVDVSHEDPEVKFNWYVDGVEVH
NAKTKPREEQYNSTYRVVSVLTVLHQDWLNGKEYKCKVSNKALGAP
IEKTISKAKGQPREPQVYTLPPSRDELTKNQVSLWCLVKGFYPSDI
AVEWESNGQPENNYKTTPPVLDSDGSFFLYSKLTVDKSRWQQGNVF
SCSVMHEALHNHYTQKSLSLSPGK;
b) the construct is a bivalent construct, designated EN1206-BV, comprising identical chains, wherein each chain comprises the dAb and Fc with modifications—YTE (M252Y,S254T,T256E, by EU numbering) LALAPG (L234A,L235A,P329G, by EU numbering), wherein each chain comprising the sequence, (SEQ ID NO:1507):
EVQLLESGGGLVQPGGSLRLSCAASGFTFAHETMVWVRQAPGKGLE
WVSHIPPDGQDPFYADSVKGRFTISRDNSKNTLYLQMNSLRAEDTA
VYHCALLPKRGPWFDYWGQGTLVTVSSDKTHTCPPCPAPEAAGGPS
VFLFPPKPKDTLYITREPEVTCVVVDVSHEDPEVKFNWYVDGVEVH
NAKTKPREEQYNSTYRVVSVLTVLHQDWLNGKEYKCKVSNKALGAP
IEKTISKAKGQPREPQVYTLPPSRDELTKNQVSLTCLVKGFYPSDI
AVEWESNGQPENNYKTTPPVLDSDGSFFLYSKLTVDKSRWQQGNVF
SCSVMHEALHNHYTQKSLSLSPGK.

11. A polypeptide chain for forming a construct of claim 1 selected from:
a) SEQ ID NO:1488, which is an Fc only comprising T366S, L368A,Y407V, by EU numbering, to form a hole, M252Y, S254T, T256E, by EU numbering, for increased half-life, L234A, L235A, P329G, by EU numbering, for minimizing, eliminating, or reducing Fc effector function, and includes a leader sequence, MGWSCIILFLVATATGVHS (SEQ ID NO:1509), that is optional and is cleaved off in a cell in which is the polypeptide is expressed and comprises the sequence:
MGWSCIILFLVATATGVHSDKTHTCPPCPAPEAAGGPSVFLFPPKP
KDTLYITREPEVTCVVVDVSHEDPEVKFNWYVDGVEVHNAKTKPRE
EQYNSTYRVVSVLTVLHQDWLNGKEYKCKVSNKALGAPIEKTISKA
KGQPREPQVYTLPPSRDELTKNQVSLSCAVKGFYPSDIAVEWESNG
QPENNYKTTPPVLDSDGSFFLVSKLTVDKSRWQQGNVFSCSVMHEA
LHNHYTQKSLSLSPGK;
b) SEQ ID NO:1489, which comprises a dAb and Fe, where the Fc comprises the modifications T366W to form a knob, M252Y, S254T, T256E, by EU numbering, for increased half-life, and L234A, L235A, P329G, by EU numbering, for minimizing, reducing, or eliminating Fc effector function, and the chain includes a leader sequence, MGWSCIILFLVATATGVHS (SEQ ID NO:1509) that is optional and is cleaved off in a cell in which is the polypeptide is expressed:
MGWSCIILFLVATATGVHSEVQLLESGGGLVQPGGSLRLSCAASGF
TFAHETMVWVRQAPGKGLEWVSHIPPDGQDPFYADSVKGRFTISRD
NSKNTLYLQMNSLRAEDTAVYHCALLPKRGPWFDYWGQGTLVTVSS
DKTHTCPPCPAPEAAGGPSVFLFPPKPKDTLYITREPEVTCVVVDV
SHEDPEVKFNWYVDGVEVHNAKTKPREEQYNSTYRVVSVLTVLHQD
WLNGKEYKCKVSNKALGAPIEKTISKAKGQPREPQVYTLPPSRDEL
TKNQVSLWCLVKGFYPSDIAVEWESNGQPENNYKTTPPVLDSDGSF
FLYSKLTVDKSRWQQGNVFSCSVMHEALHNHYTQKSLSLSPGK;
c) SEQ ID NO:1505, which is an Fc with T366S, L368A, Y407V, by EU numbering, to form a hole, M252Y, S254T, T256E, by EU numbering, for increased half-life, L234A, L235A, P329G, by EU numbering, for minimizing, reducing, or eliminating Fc effector function, and comprises the sequence:
DKTHTCPPCPAPEAAGGPSVFLFPPKPKDTLYITREPEVTCVVVDV
SHEDPEVKFNWYVDGVEVHNAKTKPREEQYNSTYRVVSVLTVLHQD
WLNGKEYKCKVSNKALGAPIEKTISKAKGQPREPQVYTLPPSRDEL
TKNQVSLSCAVKGFYPSDIAVEWESNGQPENNYKTTPPVLDSDGSF
FLVSKLTVDKSRWQQGNVFSCSVMHEALHNHYTQKSLSLSPGK;
d) SEQ ID NO:1506, which comprises a dAb and Fc, where the Fc comprises, by EU numbering, T366W to form a knob, M252Y, S254T, T256E, by EU numbering, for increased half-life, and L234A, L235A, P329G, by EU numbering, for minimizing, reducing, or eliminating Fc effector function, and comprises the sequence:
EVQLLESGGGLVQPGGSLRLSCAASGFTFAHETMVWVRQAPGKGLE
WVSHIPPDGQDPFYADSVKGRFTISRDNSKNTLYLQMNSLRAEDTA
VYHCALLPKRGPWFDYWGQGTLVTVSSDKTHTCPPCPAPEAAGGPS
VFLFPPKPKDTLYITREPEVTCVVVDVSHEDPEVKFNWYVDGVEVH
NAKTKPREEQYNSTYRVVSVLTVLHQDWLNGKEYKCKVSNKALGAP
IEKTISKAKGQPREPQVYTLPPSRDELTKNQVSLWCLVKGFYPSDI
AVEWESNGQPENNYKTTPPVLDSDGSFFLYSKLTVDKSRWQQGNVF
SCSVMHEALHNHYTQKSLSLSPGK.

12. A chain for forming a construct of claim 1, comprising the sequence:
(SEQ ID NO: 1507)
EVQLLESGGGLVQPGGSLRLSCAASGFTFAHETMVWVRQAPGKGLE
WVSHIPPDGQDPFYADSVKGRFTISRDNSKNTLYLQMNSLRAEDTA
VYHCALLPKRGPWFDYWGQGTLVTVSSDKTHTCPPCPAPEAAGGPS
VFLFPPKPKDTLYITREPEVTCVVVDVSHEDPEVKFNWYVDGVEVH
NAKTKPREEQYNSTYRVVSVLTVLHQDWLNGKEYKCKVSNKALGAP
IEKTISKAKGQPREPQVYTLPPSRDELTKNQVSLTCLVKGFYPSDI
AVEWESNGQPENNYKTTPPVLDSDGSFFLYSKLTVDKSRWQQGNVF
SCSVMHEALHNHYTQKSLSLSPGK.

13. A construct of claim 1, comprising two chains, wherein:
a) one chain comprises the polypeptide of SEQ ID NO:1505; and
b) the second chain comprises the polypeptide of SEQ ID NO:1506, whereby the construct comprises a dAb of SEQ ID NO:59 linked to the Fc comprising a knob, T366W, by EU numbering, and is modified to have increased half-life and reduced or eliminated Fc effector function as in the first chain.

14. A construct of claim 1, comprising a dAb of any of SEQ ID NOs: 55-59, 60-84, 86-88, 450, or 495-498 linked directly or via a linker to a modified Fc that comprises M252Y, S254T, T256E, by EU numbering, for increasing half-life and L234A, L235A, P329G by EU numbering, for minimizing, reducing, or eliminating Fc effector function.

15. A TNFR1 antagonist construct of claim 1, comprising a dAb, an optional linker, and a modified Fc, wherein the dAb is DOM1 h-131-206 SEQ ID NO:59:
EVQLLESGGGLVQPGGSLRLSCAASGFTFAHETMVWVRQAPGKGLE
WVSHIPPDGQDPFYADSVKGRFTISRDNSKNTLYLQMNSLRAEDTA
VYHCALLPKRGPWFDYWGQGTLVTVSS.

16. The construct of claim 1 that comprises a linker, wherein the linker is selected from among a chemical linker, a polypeptide linker, and combinations thereof.

17. The construct of claim 16 that comprises a linker between the dAb and Fc portions, wherein the linker is selected from among:
a) a linker that comprises all or a portion of the hinge sequence of trastuzumab, SCDKTH (corresponding to residues 222-227 of SEQ ID NO:26) or up to the full sequence of the hinge region of trastuzumab, that contains or has the sequence EPKSCDKTHTCPPCP (corresponding to residues 219-233 of SEQ ID NO:26), or at least 5, 6, 7, 8, 9, 10, or 11 contiguous residues thereof, or residues ESKYGPPCPPCP, set forth as residues 212-223 of SEQ ID NO:29, or a sequence having at least 98% or 99% sequence identity thereto that is a linker;
b) a linker that is or comprises a glycine-serine (GS) linker;
c) a GS linker selected from among (GlySer)ₙ, where n=1-10; (GlySer₂); (Gly₄Ser)ₙ, where n=1-10; (Gly₃Ser)ₙ, where n=1-5; (SerGly₄)ₙ, where n=1-5; (GlySerSerGly)ₙ, where n=1-5; GSGGSSGG; GSSSGSGSGSSG; GSSSGSGSGSSGG; GGSSGG; GGSSGGSGGSSSG; GSSSGSGSGGSSSGSGSG; GGSSGGSSGGGSSGGSSG; and GSSSGS;
d) a linker that comprises a GS linker and all or a portion of the hinge sequence of trastuzumab, corresponding to residues EPKSCDKTHTCPPCP, set forth as residues 219-233 of SEQ ID NO:26;
e) a linker that comprises a GS linker and comprises the sequence SCDKTH, corresponding to residues 217-222 of SEQ ID NO:31; and
f) a linker that comprises a GS linker and all or a portion of the hinge sequence of nivolumab, corresponding to residues 212-223 of SEQ ID NO:29.

18. The construct of claim 1, wherein a chain comprises a modified Fc, wherein:
the unmodified Fc is an IgG1 or IgG4 Fc;
the IgG1 Fc is selected from the IgG1 Fc of human IgG1, set forth in SEQ ID NO:10, or the IgG1 Fc of trastuzumab, set forth in SEQ ID NO:27;
the IgG4 Fc is selected from the IgG4 Fc of human IgG4, set forth in SEQ ID NO:16, or the IgG4 Fc of nivolumab, set forth in SEQ ID NO:30; and
optionally, the Fc includes one or more modifications to introduce knobs-into-holes, and/or increase or enhance neonatal Fc receptor (FcRn) recycling, and/or reduce or eliminate immune effector functions.

19. The construct of claim 1, wherein the Fc is selected from among:
a) an Fc that comprises knobs-into-holes modifications, wherein:
the knob mutation is selected from among one or more of S354C, T366Y, T366W, and T394W by EU numbering; and
the hole mutation is selected from among one or more of Y349C, T366S, L368A, F405A, Y407T, Y407A, and Y407V by EU numbering;
b) an Fc that comprises modifications to increase or enhance FcRn recycling that is/are selected from among one or more of:
T250Q, T250R, M252F, M252W, M252Y, S254T, T256D, T256E, T256Q, V259I, V308F, E380A, M428L, H433K, N434F, N434A, N434W, N434S, N434Y, Y436H, M252Y/T256Q, M252F/T256D, M252Y/S254T/T256E, H433K/N434F/Y436H, N434F/Y436H, T250Q/M428L, T250R/M428L, M428L/N434S, V259I/V308F, V259I/V308F/M428L, E294del/T307P/N434Y, and T256N/A378V/S383N/N434Y, by EU numbering;
c) an Fe that comprises modifications to immune effector functions that are selected from among one or more of complement-dependent cytotoxicity (CDC), antibody-dependent cell-mediated cytotoxicity (ADCC) and antibody-dependent cell-mediated phagocytosis (ADCP);
d) a construct that comprises modification(s) in the Fc to reduce or eliminate immune effector functions, wherein the Fc and modifications are selected from among one or more of:
in IgG1: L235E, L234A/L235A, L234E/L235F/P331S, L234F/L235E/P331S, L234A/L235A/P329G, L234A/L235A/G237A/P238S/H268A/A330S/P331S, G236R/L328R, G237A, E318A, D265A, E233P, N297A, N297Q, N297D, N297G, N297G/D265A, A330L, D270A, P329A, P331A, K322A, V264A, and F241A, by EU numbering; and
in IgG4: L235E, F234A/L235A, S228P/L235E, and S228P/F234A/L235A, by EU numbering;
e) an Fc that is an IgG Fc that comprises one or more of the following modifications:
i) a modification(s) to introduce knobs-into-holes, wherein:
the knob mutation is selected from among one or more of S354C, T366Y, T366W, and T394W by EU numbering; and
the hole mutation is selected from among one or more of Y349C, T366S, L368A, F405A, Y407T, Y407A, and Y407V by EU numbering;
ii) a modification(s) to increase or enhance neonatal Fc receptor (FcRn) recycling, wherein the modification is selected from among one or more of:
T250Q, T250R, M252F, M252W, M252Y, S254T, T256D, T256E, T256Q, V259I, V308F, E380A, M428L, H433K, N434F, N434A, N434W, N434S, N434Y, Y436H, M252Y/T256Q, M252F/T256D, M252Y/S254T/T256E, H433K/N434F/Y436H, N434F/Y436H, T250Q/M428L, T250R/M428L, M428L/N434S, V259I/V308F, V259I/V308F/M428L, E294del/T307P/N434Y, and T256N/A378V/S383N/N434Y, by EU numbering; and
iii) a modification(s) to increase or enhance immune effector functions, wherein:
the immune effector functions are selected from among one or more of CDC, ADCC and ADCP; and
the modification(s) to increase or enhance immune effector functions is selected from among one or more of:
in IgG1: S239D; 1332E; S239D/I332E; S239D/A330L/I332E; S298A/E333A/K334A; F243L/R292P/Y300L/V305I/P396L; L235V/F243L/R292P/Y300L/P396L; F243L/R292P/Y300L; L234Y/G236W/S298A in the first heavy chain and S239D/A330L/I332E in the second heavy chain; L234Y/L235Q/G236W/S239M/H268D/D270E/S298A in the first heavy chain and D270E/K326D/A330M/K334E in the second heavy chain; A327Q/P329A; D265A/S267A/H268A/D270A/K326A/S337A; T256A/K290A/S298A/E333A/K334A; G236A; G236A/I332E; G236A/S239D/I332E; G236A/S239D/A330L/I332E; introduction of a biantennary glycan at residue N297; introduction of an afucosylated glycan at residue N297; K326W; K326A; E333A; K326A/E333A; K326W/E333 S; K326M/E333 S; K222W/T223W; K222W/T223W/H224W; D221W/K222W; C220D/D221C; C220D/D221C/K222W/T223W; H268F/S324T; S267E; H268F; S324T; S267E/H268F/S324T; G236A/I332E/S267E/H268F/S324T; E345R; and E345R/E430G/S440Y, by EU numbering; and
f) an Fc that is modified to increase binding to the inhibitory Fcγ receptor (FcγR) FcγRIIb; and
g) combinations of a)-f).

20. The construct of claim 1 that comprises the dAb of SEQ ID NO:59 or a variant thereof having at least 95% sequence identity thereto and binding to the same epitope as SEQ ID NO:59 linked directly or indirectly via a linker to the modified Fc.

21. The construct of claim 1, comprising two of polypeptide chains of SEQ ID NOs:1505-1507 linked, whereby they form monovalent or divalent constructs, or comprising variants of the chains of SEQ ID NOs:1505-1507 having at least 95% sequence identity thereto and that bind TNRF1, have anti-TNFR1 antagonist activity, and retain the half-life of constructs.

22. A pharmaceutical composition, comprising a construct of claim 1.

23. A method of treating a disease, disorder, or condition that is treated by inhibiting TNFR1, comprising administering a pharmaceutical composition of claim 22.

24. The method of claim 23, wherein the disease, disorder, or condition is one or more of a chronic inflammatory, autoimmune, neurodegenerative, demyelinating, or respiratory disease or disorder, or a disease, condition or disorder characterized by overexpression of TNF or deregulated TNFR1 signaling in its etiology.

25. The method of claim 23, wherein the disease, disorder, or condition is selected from: rheumatoid arthritis (RA), psoriasis, psoriatic arthritis, juvenile idiopathic arthritis (JIA), spondylarthritis, ankylosing spondylitis, Crohn's disease, ulcerative colitis, inflammatory bowel disease (IBD), uveitis, fibrotic diseases, endometriosis, lupus, multiple sclerosis (MS), congestive heart failure, cardiovascular disease, myocardial infarction (MI), atherosclerosis, metabolic diseases, cytokine release syndrome, septic shock, sepsis, acute respiratory distress syndrome (ARDS), severe acute respiratory syndrome (SARS), SARS-CoV-2, influenza, acute and chronic neurodegenerative diseases, demyelinating diseases and disorders, stroke, Alzheimer's disease, Parkinson's disease, Behget's disease, Dupuytren's disease, Tumor Necrosis Factor Receptor-Associated Periodic Syndrome (TRAPS), pancreatitis, type I diabetes, chronic obstructive pulmonary disease (COPD), chronic bronchitis, emphysema, graft rejection, graft versus host disease (GvHD), lung inflammation, pulmonary diseases and conditions, asthma, cystic fibrosis, idiopathic pulmonary fibrosis, acute fulminant viral or bacterial infections, pneumonia, genetically inherited diseases with TNF/TNFR1 as the causative pathologic mediator, periodic fever syndrome, or cancer.

26. A nucleic acid molecule encoding a polypeptide chain in the construct of claim 1.

27. A vector comprising the nucleic acid molecule of claim 26.

28. A cell, comprising the nucleic acid molecule of claim 26, or a vector comprising the nucleic acid.

29. A method for producing a construct or chain, comprising culturing the cell of claim 28 and isolating the resulting construct or chain.

30. The method of claim 29, wherein the chains in the construct are produced in separate cells and the constructs produced following expression in the cell, or a plurality of chains are produced in the same cell and dimers comprising two chains are isolated.
